(19) United States
(12) Patent Application Publication
(10) Pub. No.: US 2015/0152507 A1
(43) Pub. Date: Jun. 4, 2015

(54) BIOMARKERS FOR PROSTATE CANCER

(71) Applicants: Aarhus Universitet, Århus C (DK); Region Midtjylland, Viborg (DK)

(72) Inventors: Torben Falck Ørntoft, Silkeborg (DK); Karina Dalsgaard Sørensen, Arhus C (DK); Christa Haldrup, Norre Snede (DK)

(21) Appl. No.: 14/407,541

(22) PCT Filed: Jun. 14, 2013
(86) PCT No.: PCT/DK2013/050196

§ 371 Date: Dec. 12, 2014

(30) Foreign Application Priority Data
Jun. 14, 2012 (DK) PA 2012 70326

(51) Int. Cl. C12Q 1/68; G06F 19/00

(52) U.S. Cl. CPC C12Q 1/6886; G06F 19/3431; C12Q 2600/154; C12Q 2600/118; C12Q 2600/106

(57) ABSTRACT

The present application concerns methods and tools for diagnosing prostate cancer and furthermore concerns methods and tools for prognosing disease progression of prostate cancer. The method comprises determining methylation level of the genes C1orf114, HAPLN3, AOX1, GAS6, ST6GALNAC3 and ZNF660 and comparing the result with a control, thus obtaining a response which is used for diagnosing a prostate cancer and/or for prognosing aspects of an individual suffering from prostate cancer.

### FIELD OF INVENTION

[0001] The present invention relates to a method for diagnosing prostate cancer in an individual, prognosing the disease progression of prostate cancer in an individual having developed prostate cancer, predicting the outcome of prostate cancer in an individual having developed prostate cancer, monitoring the effect of treatment on prostate cancer progression in an individual having developed prostate cancer, monitoring the progression of prostate cancer from a silent/indolent to an aggressive prostate cancer in an individual having developed prostate cancer and determining the treatment regime of an individual having developed prostate cancer.

### BACKGROUND OF INVENTION

[0002] Prostate cancer (PC) is the most frequently diagnosed male cancer and the second leading cause of cancer-associated mortality in Western countries. PC is typically diagnosed on the basis of increased serum prostate specific antigen (PSA) levels followed by histopathological inspection of needle biopsies. The use of PSA for PC detection, however, is associated with considerable false positive rates and does not distinguish well between indolent and aggressive tumours. During the past decades, increased use of PSA testing and PSA based screening has resulted in higher incidences as well as down-staging of the disease. Combined with the lack of accurate prognostic tools, this has caused substantial overdiagnosis and overtreatment of clinically insignificant PCs. Thus, although some PC patients benefit from radical prostatectomy, conservative management (active surveillance or watchful waiting) is the preferred option for some patients with low or intermediate risk PC. Up to a third of patients undergoing radical prostatectomy suffers disease recurrence (biochemical relapse) within 5-10 years and eventually develops distant metastases. Progression to metastatic disease can be delayed by androgen deprivation therapy, but most tumours become resistant within two years and advance to castrate-refractory prostate cancer (CRPC) associated with high morbidity and mortality.

[0003] Methylation of DNA is a mechanism for changing the base sequence of DNA without altering its coding function. DNA methylation is a heritable, reversible and epigenetic change. DNA methylation harbours the potential to alter gene expression which in turn affects developmental and genetic processes.

[0004] CpG-rich sequences are known as CpG islands. CpG islands are distributed across the human genome and often span the promoter region as well as the first 5′ exon of protein coding genes. Methylation of individual promoter region CpG islands usually turns off transcription by recruiting histone deacetylases, which supports the formation of inactive chromatin (Humphrey P A et al.: Mod Pathol 2004; 17: 292-306). CpG islands are typically between 0.2 to about 1 kb in length and are located upstream of many housekeeping and tissue-specific genes, but may also extend into gene coding regions. Therefore, it is the methylation of cytosine residues within CpG islands in somatic tissues, which is believed to affect gene function by altering transcription (Cedar, Cell 53:3-4, 1988).

### SUMMARY OF INVENTION

[0005] As the prostate specific antigen (PSA) method is associated with considerable false negative rates and does not distinguish well between clinically indolent or aggressive tumours, there is a need for novel markers of prostate cancer that can be used on their own or in combination with existing markers.

[0006] The present inventors have found that the AOX1, C1orf114, GAS6, HAPLN3, ST6GALNAC3 and ZNF660 genes are associated with prostate cancer. Each of the genes can be used individually as an independent marker of prostate cancer; but they may also be used in combination with one another or with previously known prostate markers.

[0007] In one aspect, the invention thus concerns a method of determining if an individual has, or is at risk of developing prostate cancer, the method comprising the steps of:
[0008] a) providing a sample obtained from said individual;
[0009] b) determining in the sample of a),
   [0010] the methylation level, and/or
   [0011] the transcriptional expression level, and/or
   [0012] the translational expression level,
   [0013] of a panel of nucleotide sequences, wherein the panel comprises:
[0014] I′) the nucleotide sequence of SEQ ID NO:3 (GAS6); or
[0015] I″) a nucleotide sequence being complementary to SEQ ID NO: 3; or
[0016] I″′) a nucleotide sequence having at least 90% sequence identity to any one of I′ or I″; or
[0017] I″″) a fragment of any one of I′, I″ or I″′, wherein the fragment comprises at least 15 consecutive nucleotides of any one of I′, I″ or I″′; and
[0018] II′) the nucleotide sequence of SEQ ID NO:4 (HAPLN3); or
[0019] II″) a nucleotide sequence being complementary to SEQ ID NO: 4; or
[0020] II″′) a nucleotide sequence having at least 90% sequence identity to any one of II′ or II″; or
[0021] II″″) a fragment of any one of II′, II″ or II″′, wherein the fragment comprises at least 15 consecutive nucleotides of any one of I′, I″ or I″′; and
[0022] III′) the nucleotide sequence of SEQ ID NO:1 (AOX1); or
[0023] III″) a nucleotide sequence being complementary to SEQ ID NO: 1; or
[0024] III″′) a nucleotide sequence having at least 90% sequence identity to any one of III′ or III″′; or
[0025] III″″) a fragment of any one of III′, III″ or III″′, wherein the fragment comprises at least 15 consecutive nucleotides of any one of III′, III″ or III″′; and
[0026] IV′) the nucleotide sequence of SEQ ID NO:2 (C1orf114); or
[0027] IV″) a nucleotide sequence being complementary to SEQ ID NO: 2; or
[0028] IV″′) a nucleotide sequence having at least 90% sequence identity to any one of IV′ or IV″; or
[0029] IV″″) a fragment of any one of IV′, IV″ or IV″′, wherein the fragment comprises at least 15 consecutive nucleotides of any one of IV′, IV″ or IV″′; and
[0030] V′) the nucleotide sequence of SEQ ID NO:5 (ST6GALNAC3); or
[0031] V″) a nucleotide sequence being complementary to SEQ ID NO: 5; or
[0032] V″′) a nucleotide sequence having at least 90% sequence identity to any one of V′ or V″; or
[0033] V″″) a fragment of any one of V′, V″ or V″′, wherein the fragment comprises at least 15 consecutive nucleotides of any one of V′, V″ or V″′; and
[0034] VI′) the nucleotide sequence of SEQ ID NO:6 (ZNF660); or
[0035] VI″) a nucleotide sequence being complementary to SEQ ID NO: 6; or
[0036] VI″′) a nucleotide sequence having at least 90% sequence identity to any one of VI′ or VI″; or
[0037] VI″″) a fragment of any one of VI′, VI″ or VI″′, wherein the fragment comprises at least 15 consecutive nucleotides of any one of VI′, VI″ or VI″′;

[0038] c) comparing the methylation level, transcriptional level, and/or translational expression level of the sampled nucleotide sequence of b), with the corresponding methylation level, transcriptional level, and/or translational expression level of a corresponding nucleotide sequence of a control sample, wherein a methylation level being significantly higher than the methylation level of the control sample, and/or a transcriptional and/or a translational expression level being significantly lower than the transcriptional level of the control sample, is indicative of that the individual has, or is at risk of developing prostate cancer.

[0039] The six genes identified by the present inventors as relevant for prostate cancer, may be arranged in panels and optimised for e.g. diagnostic or prognostic purposes. Thus in one aspect, the invention concerns a method of determining if an individual has, or is at risk of developing prostate cancer, the method comprising the steps of:
[0040] a) providing a sample obtained from said individual;
[0041] b) determining in the sample of a),
   [0042] the methylation level, and/or
   [0043] the transcriptional expression level, and/or
   [0044] the translational expression level,
[0045] of a panel comprising at least two nucleotide sequences, wherein the panel is selected from the group consisting of:
[0046] i) C1orf114 (SEQ ID NO:2) and GAS6 (SEQ ID NO:3);
[0047] ii) GAS6 (SEQ ID NO:3) and HAPLN3 (SEQ ID NO:4);
[0048] iii) C1orf114 (SEQ ID NO:2), GAS6 (SEQ ID NO:3) and HAPLN3 (SEQ ID NO:4);
[0049] iv) AOX1 (SEQ ID NO:1), C1orf114 (SEQ ID NO:2), GAS6 (SEQ ID NO:3) and HAPLN3 (SEQ ID NO:4);
[0050] v) AOX1 (SEQ ID NO:1), GAS6 (SEQ ID NO:3) and HAPLN3 (SEQ ID NO:4);
[0051] vi) AOX1 (SEQ ID NO:1), C1orf114 (SEQ ID NO:2) and GAS6 (SEQ ID NO:3);
[0052] vii) AOX1 (SEQ ID NO:1) and GAS6 (SEQ ID NO:3);
[0053] viii) C1orf114 (SEQ ID NO:2) and HAPLN3 (SEQ ID NO:4);
[0054] ix) AOX1 (SEQ ID NO:1), C1orf114 (SEQ ID NO:2) and HAPLN3 (SEQ ID NO:4);
[0055] x) AOX1 (SEQ ID NO:1) and HAPLN3 (SEQ ID NO:4);
[0056] xi) AOX1 (SEQ ID NO:1) and C1orf114 (SEQ ID NO:2);
[0057] xii) AOX1 (SEQ ID NO:1) and ST6GALNAC3 (SEQ ID NO:5);
[0058] xiii) AOX1 (SEQ ID NO:1) and ZNF660 (SEQ ID NO:6);
[0059] xiv) C1orf114 (SEQ ID NO:2) and ST6GALNAC3 (SEQ ID NO:5);
[0060] xv) C1orf114 (SEQ ID NO:2) and ZNF660 (SEQ ID NO:6);
[0061] xvi) GAS6 (SEQ ID NO:3) and ST6GALNAC3 (SEQ ID NO:5);
[0062] xvii) GAS6 (SEQ ID NO:3) and ZNF660 (SEQ ID NO:6);
[0063] xviii) HAPLN3 (SEQ ID NO:4) and ST6GALNAC3 (SEQ ID NO:5);
[0064] xix) HAPLN3 (SEQ ID NO:4) and ZNF660 (SEQ ID NO:6);
[0065] xx) ST6GALNAC3 (SEQ ID NO:5) and ZNF660 (SEQ ID NO:6);
[0066] xxi) AOX1 (SEQ ID NO:1), C1orf114 (SEQ ID NO:2) and ST6GALNAC3 (SEQ ID NO:5);
[0067] xxii) AOX1 (SEQ ID NO:1), C1orf114 (SEQ ID NO:2) and ZNF660 (SEQ ID NO:6);
[0068] xxiii) AOX1 (SEQ ID NO:1), GAS6 (SEQ ID NO:3) and ST6GALNAC3 (SEQ ID NO:5);
[0069] xxiv) AOX1 (SEQ ID NO:1), GAS6 (SEQ ID NO:3) and ZNF660 (SEQ ID NO:6);
[0070] xxv) AOX1 (SEQ ID NO:1), HAPLN3 (SEQ ID NO:4) and ST6GALNAC3 (SEQ ID NO:5);
[0071] xxvi) AOX1 (SEQ ID NO:1), HAPLN3 (SEQ ID NO:4) and ZNF660 (SEQ ID NO:6);
[0072] xxvii) AOX1 (SEQ ID NO:1), ST6GALNAC3 (SEQ ID NO:5) and ZNF660 (SEQ ID NO:6);
[0073] xxviii) C1orf114 (SEQ ID NO:2), GAS6 (SEQ ID NO:3) and ST6GALNAC3 (SEQ ID NO:5);
[0074] xxix) C1orf114 (SEQ ID NO:2), GAS6 (SEQ ID NO:3) and ZNF660 (SEQ ID NO:6);
[0075] xxx) C1orf114 (SEQ ID NO:2), HAPLN3 (SEQ ID NO:4) and ST6GALNAC3 (SEQ ID NO:5);
[0076] xxxi) C1orf114 (SEQ ID NO:2), HAPLN3 (SEQ ID NO:4) and ZNF660 (SEQ ID NO:6);
[0077] xxxii) C1orf114 (SEQ ID NO:2), ST6GALNAC3 (SEQ ID NO:5) and ZNF660 (SEQ ID NO:6);
[0078] xxxiii) GAS6 (SEQ ID NO:3), HAPLN3 (SEQ ID NO:4) and ST6GALNAC3 (SEQ ID NO:5);
[0079] xxxiv) GAS6 (SEQ ID NO:3), HAPLN3 (SEQ ID NO:4) and ZNF660 (SEQ ID NO:6);
[0080] xxxv) GAS6 (SEQ ID NO:3), ST6GALNAC3 (SEQ ID NO:5) and ZNF660 (SEQ ID NO:6);
[0081] xxxvi) HAPLN3 (SEQ ID NO:4), ST6GALNAC3 (SEQ ID NO:5) and ZNF660 (SEQ ID NO:6);
[0082] xxxvii) AOX1 (SEQ ID NO:1), C1orf114 (SEQ ID NO:2) and GAS6 (SEQ ID NO:3) and ST6GALNAC3 (SEQ ID NO:5);
[0083] xxxviii) AOX1 (SEQ ID NO:1), C1orf114 (SEQ ID NO:2) GAS6 (SEQ ID NO:3) and ZNF660 (SEQ ID NO:6);
[0084] xxxix) AOX1 (SEQ ID NO:1), C1orf114 (SEQ ID NO:2), HAPLN3 (SEQ ID NO:4),
[0085] xl) AOX1 (SEQ ID NO:1), C1orf114 (SEQ ID NO:2), HAPLN3 (SEQ ID NO:4), and ST6GALNAC3 (SEQ ID NO:5);
[0086] xli) AOX1 (SEQ ID NO:1), C1orf114 (SEQ ID NO:2), ST6GALNAC3 (SEQ ID NO:5) and ZNF660 (SEQ ID NO:6);
[0087] xlii) AOX1 (SEQ ID NO:1), GAS6 (SEQ ID NO:3), HAPLN3 (SEQ ID NO:4) and ST6GALNAC3 (SEQ ID NO:5);
[0088] xliii) AOX1 (SEQ ID NO:1), GAS6 (SEQ ID NO:3) and HAPLN3 (SEQ ID NO:4);
[0089] xliv) AOX1 (SEQ ID NO:1), GAS6 (SEQ ID NO:3) and ST6GALNAC3 (SEQ ID NO:5);
[0090] xlv) AOX1 (SEQ ID NO:1), HAPLN3 (SEQ ID NO:4), ST6GALNAC3 (SEQ ID NO:5) and ZNF660 (SEQ ID NO:6);
[0091] xlvi) C1orf114 (SEQ ID NO:2), GAS6 (SEQ ID NO:3), HAPLN3 (SEQ ID NO:4) and ST6GALNAC3 (SEQ ID NO:5);
[0092] xlvii) C1orf114 (SEQ ID NO:2), GAS6 (SEQ ID NO:3), HAPLN3 (SEQ ID NO:4) and ZNF660 (SEQ ID NO:6);
[0093] xlviii) C1orf114 (SEQ ID NO:2), GAS6 (SEQ ID NO:3), ST6GALNAC3 (SEQ ID NO:5) and ZNF660 (SEQ ID NO:6);
[0094] xlix) C1orf114 (SEQ ID NO:2), HAPLN3 (SEQ ID NO:4), ST6GALNAC3 (SEQ ID NO:5) and ZNF660 (SEQ ID NO:6);
[0095] l) GAS6 (SEQ ID NO:3), HAPLN3 (SEQ ID NO:4), ST6GALNAC3 (SEQ ID NO:5) and ZNF660 (SEQ ID NO:6);
[0096] li) AOX1 (SEQ ID NO:1), C1orf114 (SEQ ID NO:2), GAS6 (SEQ ID NO:3), HAPLN3 (SEQ ID NO:4) and ST6GALNAC3 (SEQ ID NO:5);
[0097] lii) AOX1 (SEQ ID NO:1), C1orf114 (SEQ ID NO:2), GAS6 (SEQ ID NO:3), HAPLN3 (SEQ ID NO:4) and ZNF660 (SEQ ID NO:6);
[0098] liii) AOX1 (SEQ ID NO:1), C1orf114 (SEQ ID NO:2), GAS6 (SEQ ID NO:3), ST6GALNAC3 (SEQ ID NO:5) and ZNF660 (SEQ ID NO:6);
[0099] liv) AOX1 (SEQ ID NO:1), C1orf114 (SEQ ID NO:2), HAPLN3 (SEQ ID NO:4), ST6GALNAC3 (SEQ ID NO:5) and ZNF660 (SEQ ID NO:6);
[0100] lv) AOX1 (SEQ ID NO:1), GAS6 (SEQ ID NO:3), HAPLN3 (SEQ ID NO:4), ST6GALNAC3 (SEQ ID NO:5) and ZNF660 (SEQ ID NO:6);
[0101] lvi) C1orf114 (SEQ ID NO:2), GAS6 (SEQ ID NO:3), HAPLN3 (SEQ ID NO:4),
[0102] lvii) ST6GALNAC3 (SEQ ID NO:5) and ZNF660 (SEQ ID NO:6); AOX1 (SEQ ID NO:1), C1orf114 (SEQ ID NO:2), GAS6 (SEQ ID NO:3), HAPLN3 (SEQ ID NO:4), ST6GALNAC3 (SEQ ID NO:5) and ZNF660 (SEQ ID NO:6); wherein any one of said SEQ ID NO: 1, 2, 3, 4, 5 or 6 of said panels i) through lvii) optionally is individually replaced by:
[0103] b′) a nucleotide sequence being complementary to any one of said SEQ ID NO:s 1, 2, 3, 4, 5 or 6 of said panels i) through lvii); or
[0104] b″) a nucleotide sequence having at least 90% sequence identity to any one of said SEQ ID NO:s 1, 2, 3, 4, 5 or 6 of said panels i) through lvii), or the complementary nucleotide sequences of b′); or
[0105] b″′) a fragment comprising at least 15 consecutive nucleotides of any one of said SEQ ID NO:s 1, 2, 3, 4, 5 or 6 of said panels i) through lvii), or the nucleotide sequences of b′), or the nucleotide sequences of b″);
[0106] c) comparing the methylation level, transcriptional level, and/or translational expression level of the sampled nucleotide sequences of b), with the corresponding methylation level, transcriptional level, and/or translational expression level of a corresponding nucleotide sequences of a control sample, wherein a methylation level being significantly higher than the methylation level of the control sample, and/or a transcriptional and/or a translational expression level being significantly lower than the transcriptional level of the control sample, is indicative of that the individual has, or is at risk of developing prostate cancer.

[0107] Under certain circumstances, it is advantageous to base the diagnostic use on the analysis of the characteristics of single genes. Thus in one aspect, the invention concerns a method of determining if an individual has, or is at risk of developing prostate cancer, the method comprising the steps of:
[0108] a) providing a sample obtained from said individual;
[0109] b) determining in the sample of a),
[0110] the methylation level, and/or
[0111] the transcriptional expression level, and/or
[0112] the translational expression level,
[0113] of one or more nucleotide sequences selected from the group consisting of:
[0114] I′) the nucleotide sequence of SEQ ID NO:5 (ST6GALNAC3); or
[0115] I″) a nucleotide sequence being complementary to SEQ ID NO: 5; or
[0116] I″′) a nucleotide sequence having at least 90% sequence identity to any one of I′ or I″; or
[0117] I″″) a fragment of any one of I′, I″ or I″′, wherein the fragment comprises at least 15 consecutive nucleotides of any one of I′, I″ or I″′; and
[0118] II′) the nucleotide sequence of SEQ ID NO:6 (ZNF660); or
[0119] II″) a nucleotide sequence being complementary to SEQ ID NO: 6; or
[0120] II″′) a nucleotide sequence having at least 90% sequence identity to any one of II′ or II″; or
[0121] II″″) a fragment of any one of II′, II″ or II″′, wherein the fragment comprises at least 15 consecutive nucleotides of any one of II′, II″ or II″′; and
[0122] c) comparing the methylation level, transcriptional level, and/or translational expression level of the sampled nucleotide sequence of b), with the corresponding methylation level, transcriptional level, and/or translational expression level of a corresponding nucleotide sequence of a control sample, wherein a methylation level being significantly higher than the methylation level of the control sample, and/or a transcriptional and/or a translational expression level being significantly lower than the transcriptional level of the control sample, is indicative of that the individual has, or is at risk of developing prostate cancer.

[0123] The present invention additionally provides methods for assisting in determining treatment strategy. In one such aspect, the invention concerns a method of identifying a prostate cancer patient in need of adjuvant therapy, comprising:
[0124] a) providing a sample obtained from cancerous tissue of an individual;
[0125] b) determining in the sample of a),
[0126] the methylation level, and/or
[0127] the transcriptional expression level, and/or
[0128] the translational expression level,
[0129] of one or more biomarkers, wherein the biomarkers are nucleotide sequences selected from the group consisting of:
[0130] I′) the nucleotide sequence of SEQ ID NO:3 (GAS6); or
[0131] I″) a nucleotide sequence being complementary to SEQ ID NO: 3; or
[0132] I″′) a nucleotide sequence having at least 90% sequence identity to any one of I′ or I″; or
[0133] I″″) a fragment of any one of I′, I″ or I″′, wherein the fragment comprises at least 15 consecutive nucleotides of any one of I′, I″ or I″′; and
[0134] II′) the nucleotide sequence of SEQ ID NO:4 (HAPLN3); or
[0135] II″) a nucleotide sequence being complementary to SEQ ID NO: 4; or
[0136] II″′) a nucleotide sequence having at least 90% sequence identity to any one of II′ or II″; or
[0137] II″″) a fragment of any one of II′, II″ or II″′, wherein the fragment comprises at least 15 consecutive nucleotides of any one of I′, I″ or I″′; and
[0138] III′) the nucleotide sequence of SEQ ID NO:1 (AOX1); or
[0139] III″) a nucleotide sequence being complementary to SEQ ID NO: 1; or
[0140] III″′) a nucleotide sequence having at least 90% sequence identity to any one of III′ or III″′; or
[0141] III″″) a fragment of any one of III′, III″ or III″′, wherein the fragment comprises at least 15 consecutive nucleotides of any one of III′, III″ or III″′; and
[0142] IV′) the nucleotide sequence of SEQ ID NO:2 (C1orf114); or
[0143] IV″) a nucleotide sequence being complementary to SEQ ID NO: 2; or
[0144] IV″′) a nucleotide sequence having at least 90% sequence identity to any one of IV′ or IV″; or
[0145] IV″″) a fragment of any one of IV′, IV″ or IV″′, wherein the fragment comprises at least 15 consecutive nucleotides of any one of IV′, IV″ or IV″′; and
[0146] V′) the nucleotide sequence of SEQ ID NO:5 (ST6GALNAC3); or
[0147] V″) a nucleotide sequence being complementary to SEQ ID NO: 5; or
[0148] V″′) a nucleotide sequence having at least 90% sequence identity to any one of V′ or V″; or
[0149] V″″) a fragment of any one of V′, V″ or V″′, wherein the fragment comprises at least 15 consecutive nucleotides of any one of V′, V″ or V″′; and
[0150] VI′) the nucleotide sequence of SEQ ID NO:6 (ZNF660); or
[0151] VI″) a nucleotide sequence being complementary to SEQ ID NO: 6; or
[0152] VI″′) a nucleotide sequence having at least 90% sequence identity to any one of VI′ or VI″; or
[0153] VI″″) a fragment of any one of VI′, VI″ or VI″′, wherein the fragment comprises at least 15 consecutive nucleotides of any one of VI′, VI″ or VI″′;
[0154] c) obtaining biomarker scores based on the methylation level, transcriptional level, and/or translational expression level of the sampled nucleotide sequence of b), wherein the biomarker scores indicate if the patient is in need of adjuvant therapy.

[0155] The present invention in a further aspect concerns a method for prognosing disease progression of prostate cancer in a patient, said method comprising the steps of:
[0156] a) providing a sample obtained from cancerous tissue of an individual;
[0157] b) determining in the sample of a),
[0158] the methylation level, and/or
[0159] the transcriptional expression level, and/or
[0160] the translational expression level,
[0161] of one or more biomarkers, wherein the biomarkers are nucleotide sequences selected from the group consisting of:
[0162] I′) the nucleotide sequence of SEQ ID NO:2 (C1orf114); or
[0163] I″) a nucleotide sequence being complementary to SEQ ID NO: 2; or
[0164] I″′) a nucleotide sequence having at least 90% sequence identity to any one of I′ or I″; or
[0165] I″″) a fragment of any one of I′, I″ or I″′, wherein the fragment comprises at least 15 consecutive nucleotides of any one of I′, I″ or I″′; and
[0166] II′) the nucleotide sequence of SEQ ID NO:4 (HAPLN3); or
[0167] II″) a nucleotide sequence being complementary to SEQ ID NO: 4; or
[0168] II″′) a nucleotide sequence having at least 90% sequence identity to any one of II′ or II″; or
[0169] II″″) a fragment of any one of II′, II″ or II″′, wherein the fragment comprises at least 15 consecutive nucleotides of any one of I′, I″ or I″′; and
[0170] III′) the nucleotide sequence of SEQ ID NO:1 (AOX1); or
[0171] III″) a nucleotide sequence being complementary to SEQ ID NO: 1; or
[0172] III″′) a nucleotide sequence having at least 90% sequence identity to any one of III′ or III″′; or
[0173] III″″) a fragment of any one of III′, III″ or III″′, wherein the fragment comprises at least 15 consecutive nucleotides of any one of III′, III″ or III″′; and
[0174] IV′) the nucleotide sequence of SEQ ID NO:3 (GAS6); or
[0175] IV″) a nucleotide sequence being complementary to SEQ ID NO: 4; or
[0176] IV″′) a nucleotide sequence having at least 90% sequence identity to any one of IV′ or IV″; or
[0177] IV″″) a fragment of any one of IV′, IV″ or IV″′, wherein the fragment comprises at least 15 consecutive nucleotides of any one of IV′, IV″ or IV″′; and
[0178] V′) the nucleotide sequence of SEQ ID NO:5 (ST6GALNAC3); or
[0179] V″) a nucleotide sequence being complementary to SEQ ID NO: 5; or
[0180] V″′) a nucleotide sequence having at least 90% sequence identity to any one of V′ or V″; or
[0181] V″″) a fragment of any one of V′, V″ or V″′, wherein the fragment comprises at least 15 consecutive nucleotides of any one of V′, V″ or V″′; and
[0182] VI′) the nucleotide sequence of SEQ ID NO:6 (ZNF660); or
[0183] VI″) a nucleotide sequence being complementary to SEQ ID NO: 6; or
[0184] VI″′) a nucleotide sequence having at least 90% sequence identity to any one of VI′ or VI″; or
[0185] VI″″) a fragment of any one of VI′, VI″ or VI″′, wherein the fragment comprises at least 15 consecutive nucleotides of any one of VI′, VI″ or VI″′;
[0186] c) obtaining a biomarker score based on the methylation level, transcriptional level, and/or translational expression level of the sampled nucleotide sequence of b), wherein the biomarker score is indicative of the prognosis of the prostate cancer patient.

[0187] As mentioned above, panels of different combinations of genes have been designed and, wherein each panel is suitable for a particular purpose. One such purpose is to prognosing, i.e. determining disease progression of prostate cancer. Thus in one important aspect the invention concerns a method for prognosing disease progression of prostate cancer in a patient, said method comprising the steps of:
[0188] a) providing a sample obtained from cancerous tissue of an individual;
[0189] b) determining in the sample of a),
[0190] the methylation level, and/or
[0191] the transcriptional expression level, and/or
[0192] the translational expression level,
[0193] of a panel comprising one or more nucleotide sequences, wherein the panel is selected from the group consisting of:
[0194] i) C1orf114 (SEQ ID NO:2) and HAPLN3 (SEQ ID NO:4);
[0195] ii) AOX (SEQ ID NO:1) and C1orf114 (SEQ ID NO:2);
[0196] iii) AOX (SEQ ID NO:1), C1orf114 (SEQ ID NO:2) and GAS6 (SEQ ID NO:3);
[0197] iv) C1orf114 (SEQ ID NO:2), GAS6 (SEQ ID NO:3) and HAPLN3 (SEQ ID NO:4); C1orf114 (SEQ ID NO:2);
[0198] vi) AOX (SEQ ID NO:1), C1orf114 (SEQ ID NO:2) and HAPLN3 (SEQ ID NO:4);
[0199] vii) AOX (SEQ ID NO:1), C1orf114 (SEQ ID NO:2), GAS6 (SEQ ID NO:3) and HAPLN3 (SEQ ID NO:4);
[0200] viii) C1orf114 (SEQ ID NO:2) and GAS6 (SEQ ID NO:3);
[0201] ix) AOX (SEQ ID NO:1) and GAS6 (SEQ ID NO:3);
[0202] x) AOX (SEQ ID NO:1);
[0203] xi) HAPLN3 (SEQ ID NO:4);
[0204] xii) AOX (SEQ ID NO:1) and HAPLN3 (SEQ ID NO:4);
[0205] xiii) AOX (SEQ ID NO:1), GAS6 (SEQ ID NO:3) and HAPLN3 (SEQ ID NO:4);
[0206] xiv) GAS6 (SEQ ID NO:3) and HAPLN3 (SEQ ID NO:4);
[0207] xv) GAS6 (SEQ ID NO:3);
[0208] xvi) ST6GALNAC3 (SEQ ID NO:5);
[0209] xvii) ZNF660 (SEQ ID NO:6);
[0210] xviii) AOX (SEQ ID NO:1) and ST6GALNAC3 (SEQ ID NO:5);
[0211] xix) AOX (SEQ ID NO:1) and ZNF660 (SEQ ID NO:6);
[0212] xx) C1orf114 (SEQ ID NO:2) and ST6GALNAC3 (SEQ ID NO:5);
[0213] xxi) C1orf114 (SEQ ID NO:2) and ZNF660 (SEQ ID NO:6);
[0214] xxii) GAS6 (SEQ ID NO:3) and ST6GALNAC3 (SEQ ID NO:5);
[0215] xxiii) GAS6 (SEQ ID NO:3) and ZNF660 (SEQ ID NO:6);
[0216] xxiv) HAPLN3 (SEQ ID NO:4) and ST6GALNAC3 (SEQ ID NO:5);
[0217] xxv) HAPLN3 (SEQ ID NO:4) and ZNF660 (SEQ ID NO:6);
[0218] xxvi) ST6GALNAC3 (SEQ ID NO:5) and ZNF660 (SEQ ID NO:6);
[0219] xxvii) AOX (SEQ ID NO:1), C1orf114 (SEQ ID NO:2) and ST6GALNAC3 (SEQ ID NO:5);
[0220] xxviii) AOX (SEQ ID NO:1), C1orf114 (SEQ ID NO:2) and ZNF660 (SEQ ID NO:6);
[0221] xxix) AOX (SEQ ID NO:1), GAS6 (SEQ ID NO:3) and ST6GALNAC3 (SEQ ID NO:5);
[0222] xxx) AOX (SEQ ID NO:1), GAS6 (SEQ ID NO:3) and ZNF660 (SEQ ID NO:6);
[0223] xxxi) AOX (SEQ ID NO:1), HAPLN3 (SEQ ID NO:4) and ST6GALNAC3 (SEQ ID NO:5);
[0224] xxxii) AOX (SEQ ID NO:1), HAPLN3 (SEQ ID NO:4) and ZNF660 (SEQ ID NO:6);
[0225] xxxiii) AOX (SEQ ID NO:1), ST6GALNAC3 (SEQ ID NO:5) and ZNF660 (SEQ ID NO:6);
[0226] xxxiv) C1orf114 (SEQ ID NO:2), GAS6 (SEQ ID NO:3) and ST6GALNAC3 (SEQ ID NO:5);
[0227] xxxv) C1orf114 (SEQ ID NO:2), GAS6 (SEQ ID NO:3) and ZNF660 (SEQ ID NO:6);
[0228] xxxvi) C1orf114 (SEQ ID NO:2), HAPLN3 (SEQ ID NO:4) and ST6GALNAC3 (SEQ ID NO:5);
[0229] xxxvii) C1orf114 (SEQ ID NO:2), HAPLN3 (SEQ ID NO:4) and ZNF660 (SEQ ID NO:6);
[0230] xxxviii) C1orf114 (SEQ ID NO:2), ST6GALNAC3 (SEQ ID NO:5) and ZNF660 (SEQ ID NO:6);
[0231] xxxix) GAS6 (SEQ ID NO:3), HAPLN3 (SEQ ID NO:4) and ST6GALNAC3 (SEQ ID NO:5);
[0232] xl) GAS6 (SEQ ID NO:3), HAPLN3 (SEQ ID NO:4) and ZNF660 (SEQ ID NO:6);
[0233] xli) GAS6 (SEQ ID NO:3), ST6GALNAC3 (SEQ ID NO:5) and ZNF660 (SEQ ID NO:6);
[0234] xlii) HAPLN3 (SEQ ID NO:4), ST6GALNAC3 (SEQ ID NO:5) and ZNF660 (SEQ ID NO:6);
[0235] xliii) AOX (SEQ ID NO:1), C1orf114 (SEQ ID NO:2), GAS6 (SEQ ID NO:3) and ST6GALNAC3 (SEQ ID NO:5);
[0236] xliv) AOX (SEQ ID NO:1), C1orf114 (SEQ ID NO:2), GAS6 (SEQ ID NO:3) and ZNF660 (SEQ ID NO:6);
[0237] xlv) AOX (SEQ ID NO:1), C1orf114 (SEQ ID NO:2), HAPLN3 (SEQ ID NO:4) and ST6GALNAC3 (SEQ ID NO:5);
[0238] xlvi) AOX (SEQ ID NO:1), C1orf114 (SEQ ID NO:2), HAPLN3 (SEQ ID NO:4) and ZNF660 (SEQ ID NO:6);
[0239] xlvii) AOX (SEQ ID NO:1), C1orf114 (SEQ ID NO:2), ST6GALNAC3 (SEQ ID NO:5) and ZNF660 (SEQ ID NO:6);
[0240] xlviii) AOX (SEQ ID NO:1), GAS6 (SEQ ID NO:3), HAPLN3 (SEQ ID NO:4) and ST6GALNAC3 (SEQ ID NO:5);
[0241] xlix) AOX (SEQ ID NO:1), GAS6 (SEQ ID NO:3), HAPLN3 (SEQ ID NO:4) and ZNF660 (SEQ ID NO:6);
[0242] l) AOX (SEQ ID NO:1), GAS6 (SEQ ID NO:3), ST6GALNAC3 (SEQ ID NO:5) and ZNF660 (SEQ ID NO:6);
[0243] li) AOX (SEQ ID NO:1), HAPLN3 (SEQ ID NO:4), ST6GALNAC3 (SEQ ID NO:5) and ZNF660 (SEQ ID NO:6);
[0244] lii) C1orf114 (SEQ ID NO:2), GAS6 (SEQ ID NO:3), HAPLN3 (SEQ ID NO:4) and ST6GALNAC3 (SEQ ID NO:5);
[0245] liii) C1orf114 (SEQ ID NO:2), GAS6 (SEQ ID NO:3), HAPLN3 (SEQ ID NO:4) and ZNF660 (SEQ ID NO:6);
[0246] liv) C1orf114 (SEQ ID NO:2), GAS6 (SEQ ID NO:3), ST6GALNAC3 (SEQ ID NO:5) and ZNF660 (SEQ ID NO:6);
[0247] lv) C1orf114 (SEQ ID NO:2), HAPLN3 (SEQ ID NO:4), ST6GALNAC3 (SEQ ID NO:5) and ZNF660 (SEQ ID NO:6);
[0248] lvi) GAS6 (SEQ ID NO:3), HAPLN3 (SEQ ID NO:4), ST6GALNAC3 (SEQ ID NO:5) and ZNF660 (SEQ ID NO:6);
[0249] lvii) AOX (SEQ ID NO:1), C1orf114 (SEQ ID NO:2), GAS6 (SEQ ID NO:3), HAPLN3 (SEQ ID NO:4) and ST6GALNAC3 (SEQ ID NO:5);
[0250] lviii) AOX (SEQ ID NO:1), C1orf114 (SEQ ID NO:2), GAS6 (SEQ ID NO:3), HAPLN3 (SEQ ID NO:4) and ZNF660 (SEQ ID NO:6);
[0251] lix) AOX (SEQ ID NO:1), C1orf114 (SEQ ID NO:2), GAS6 (SEQ ID NO:3), ST6GALNAC3 (SEQ ID NO:5) and ZNF660 (SEQ ID NO:6);
[0252] lx) AOX (SEQ ID NO:1), C1orf114 (SEQ ID NO:2), HAPLN3 (SEQ ID NO:4), ST6GALNAC3 (SEQ ID NO:5) and ZNF660 (SEQ ID NO:6);
[0253] lxi) AOX (SEQ ID NO:1), GAS6 (SEQ ID NO:3), HAPLN3 (SEQ ID NO:4), ST6GALNAC3 (SEQ ID NO:5) and ZNF660 (SEQ ID NO:6);
[0254] lxii) C1orf114 (SEQ ID NO:2), GAS6 (SEQ ID NO:3), HAPLN3 (SEQ ID NO:4), ST6GALNAC3 (SEQ ID NO:5) and ZNF660 (SEQ ID NO:6);
[0255] lxiii) AOX (SEQ ID NO:1), C1orf114 (SEQ ID NO:2), GAS6 (SEQ ID NO:3), HAPLN3 (SEQ ID NO:4), ST6GALNAC3 (SEQ ID NO:5) and ZNF660 (SEQ ID NO:6);
[0256] wherein any one of said SEQ ID NO: 1, 2, 3, 4, 5 or 6 of said panels i) through lxiii) optionally is individually replaced by:
[0257] b′) a nucleotide sequence being complementary to any one of said SEQ ID NO:s 1, 2, 3, 4, 5 or 6 of said panels i) through lvii); or
[0258] b″) a nucleotide sequence having at least 90% sequence identity to any one of said SEQ ID NO:s 1, 2, 3, 4, 5 or 6 of said panels i) through lvii), or the complementary nucleotide sequences of b′); or
[0259] b″′) a fragment comprising at least 15 consecutive nucleotides of any one of said SEQ ID NO:s 1, 2, 3, 4, 5 or 6 of said panels i) through lvii), or the nucleotide sequences of b′), or the nucleotide sequences of b″);
[0260] c) obtaining a biomarker score based on the methylation level, transcriptional level, and/or translational expression level of the sampled nucleotide sequence of b), wherein the biomarker score is indicative of the prognosis of the prostate cancer patient.

[0261] In one aspect, the invention concerns a method of determining the risk of progression of a prostate cancer patient after therapy, comprising:
[0262] a) providing a sample obtained from said patient;
[0263] b) determining in the sample of a),
   [0264] the methylation level, and/or
   [0265] the transcriptional expression level, and/or
   [0266] the translational expression level,
   [0267] of one or more biomarkers, wherein the biomarkers are nucleotide sequences selected from the group consisting of:
   [0268] I′) the nucleotide sequence of SEQ ID NO:2 (C1orf114); or
   [0269] I″) a nucleotide sequence being complementary to SEQ ID NO: 2; or
   [0270] I″′) a nucleotide sequence having at least 90% sequence identity to any one of I′ or I″; or
   [0271] I″″) a fragment of any one of I′, I″ or I″′, wherein the fragment comprises at least 15 consecutive nucleotides of any one of I′, I″ or I″′; and
   [0272] II′) the nucleotide sequence of SEQ ID NO:4 (HAPLN3); or
   [0273] II″) a nucleotide sequence being complementary to SEQ ID NO: 4; or
   [0274] II″′) a nucleotide sequence having at least 90% sequence identity to any one of II′ or II″; or
   [0275] II″″) a fragment of any one of II′, II″ or II″′, wherein the fragment comprises at least 15 consecutive nucleotides of any one of I′, I″ or I″′; and
   [0276] III′) the nucleotide sequence of SEQ ID NO:1 (AOX1); or
   [0277] III″) a nucleotide sequence being complementary to SEQ ID NO: 1; or
   [0278] III″′) a nucleotide sequence having at least 90% sequence identity to any one of III′ or III″′; or
   [0279] III″″) a fragment of any one of III′, III″ or III″′, wherein the fragment comprises at least 15 consecutive nucleotides of any one of III′, III″ or III″′; and
   [0280] IV′) the nucleotide sequence of SEQ ID NO:3 (GAS6); or
   [0281] IV″) a nucleotide sequence being complementary to SEQ ID NO: 4; or
   [0282] IV″′) a nucleotide sequence having at least 90% sequence identity to any one of IV′ or IV″; or
   [0283] IV″″) a fragment of any one of IV′, IV″ or IV″′, wherein the fragment comprises at least 15 consecutive nucleotides of any one of IV′, IV″ or IV″′; and
   [0284] V′) the nucleotide sequence of SEQ ID NO:5 (ST6GALNAC3); or
   [0285] V″) a nucleotide sequence being complementary to SEQ ID NO: 5; or
   [0286] V″′) a nucleotide sequence having at least 90% sequence identity to any one of V′ or V″; or
   [0287] V″″) a fragment of any one of V′, V″ or V″′, wherein the fragment comprises at least 15 consecutive nucleotides of any one of V′, V″ or V″′; and
   [0288] VI′) the nucleotide sequence of SEQ ID NO:6 (ZNF660); or
   [0289] VI″) a nucleotide sequence being complementary to SEQ ID NO: 6; or
   [0290] VI″′) a nucleotide sequence having at least 90% sequence identity to any one of VI′ or VI″; or
   [0291] VI″″) a fragment of any one of VI′, VI″ or VI″′, wherein the fragment comprises at least 15 consecutive nucleotides of any one of VI′, VI″ or VI″′;
[0292] c) obtaining a biomarker score based on the methylation level, transcriptional level, and/or translational expression level of the sampled nucleotide sequence of b),
[0293] d) correlating the methylation level, transcriptional level, and/or translational expression level with the risk of progression.

[0294] In another aspect the invention concerns a method for assisting prognosis of disease progression of prostate cancer in an individual having developed prostate cancer, the method comprising the steps of:

a) determining the methylation level of at least one gene selected from the group consisting of C1orf114 (SEQ ID NO:2), HAPLN3 (SEQ ID NO:4), AOX1 (SEQ ID NO:1), GAS6 (SEQ ID NO:3), ST6GALNAC3 (SEQ ID NO:5) and ZNF660 (SEQ ID NO:6) or determining the methylation level of at least one nucleotide sequence having at least 90% sequence identity with a nucleotide sequence selected from the group consisting of SEQ ID NO:2, SEQ ID NO:4, SEQ ID NO:1, SEQ ID NO:3, SEQ ID NO:5, and SEQ ID NO:6 or part thereof in a sample from said individual, and/or
b) determining the transcriptional expression level of at least one gene selected from the group consisting of C1orf114 (SEQ ID NO:2), HAPLN3 (SEQ ID NO:4), AOX1 (SEQ ID NO:1), GAS6 (SEQ ID NO:3), ST6GALNAC3 (SEQ ID NO:5) and ZNF660 (SEQ ID NO:6), or nucleotide sequence having at least 90% sequence identity with at least one nucleotide sequence selected from the group consisting of SEQ ID NO:2, SEQ ID NO:4, SEQ ID NO:1, SEQ ID NO:3, SEQ ID NO:5, and SEQ ID NO:6 or part thereof in said sample and/or
c) determining the translational expression level of at least one gene selected from the group consisting of C1orf114 (SEQ ID NO:2), HAPLN3 (SEQ ID NO:4), AOX1 (SEQ ID NO:1), GAS6 (SEQ ID NO:3), ST6GALNAC3 (SEQ ID NO:5) and ZNF660 (SEQ ID NO:6), or nucleotide sequence having at least 90% sequence identity with at least one nucleotide sequence selected from the group consisting of SEQ ID NO:2, SEQ ID NO:4, SEQ ID NO:1, SEQ ID NO:3, SEQ ID NO:5, and SEQ ID NO:6 or part thereof in said sample
wherein the methylation level of i) and/or the transcriptional level of ii) and/or the translational expression level of iii) is indicative of the outcome of prostate cancer

[0295] In one aspect, the invention concerns a method for assisting in predicting and/or for predicting the outcome of prostate cancer in an individual having developed prostate cancer comprising the steps of:

a) determining the methylation level of at least one gene selected from the group consisting of C1orf114 (SEQ ID NO:2), HAPLN3 (SEQ ID NO:4), AOX1 (SEQ ID NO:1), GAS6 (SEQ ID NO:3), ST6GALNAC3 (SEQ ID NO:5) and ZNF660 (SEQ ID NO:6) or determining the methylation level of at least one nucleotide sequence having at least 90% sequence identity with a nucleotide sequence selected from the group consisting of SEQ ID NO:2, SEQ ID NO:4, SEQ ID NO:1, SEQ ID NO:3, SEQ ID NO:5, and SEQ ID NO:6 or part thereof in a sample from said individual, and/or
b) determining the transcriptional expression level of at least one gene selected from the group consisting of C1orf114 (SEQ ID NO:2), HAPLN3 (SEQ ID NO:4), AOX1 (SEQ ID NO:1), GAS6 (SEQ ID NO:3), ST6GALNAC3 (SEQ ID NO:5) and ZNF660 (SEQ ID NO:6), or nucleotide sequence having at least 90% sequence identity with at least one nucleotide sequence selected from the group consisting of SEQ ID NO:2, SEQ ID NO:4, SEQ ID NO:1, SEQ ID NO:3, SEQ ID NO:5, and SEQ ID NO:6 or part thereof in said sample and/or
c) determining the translational expression level of at least one gene selected from the group consisting of C1orf114 (SEQ ID NO:2), HAPLN3 (SEQ ID NO:4), AOX1 (SEQ ID NO:1), GAS6 (SEQ ID NO:3), ST6GALNAC3 (SEQ ID NO:5) and ZNF660 (SEQ ID NO:6), or nucleotide sequence having at least 90% sequence identity with at least one nucleotide sequence selected from the group consisting of SEQ ID NO:2, SEQ ID NO:4, SEQ ID NO:1, SEQ ID NO:3, SEQ ID NO:5, and SEQ ID NO:6 or part thereof in said sample
wherein the methylation level of a) and/or the transcriptional level of b) and/or the translational expression level of c) is indicative of the outcome of prostate cancer.

[0296] In another aspect the invention concerns a method for assisting in monitoring and/or for monitoring the effect of treatment on prostate cancer progression in an individual having developed prostate cancer and being treated for said prostate cancer, comprising the steps of:

a) determining the methylation level of at least one gene selected from the group consisting of C1orf114 (SEQ ID NO:2), HAPLN3 (SEQ ID NO:4), AOX1 (SEQ ID NO:1), GAS6 (SEQ ID NO:3), ST6GALNAC3 (SEQ ID NO:5) and ZNF660 (SEQ ID NO:6) or determining the methylation level of at least one nucleotide sequence having at least 90% sequence identity with a nucleotide sequence selected from the group consisting of SEQ ID NO:2, SEQ ID NO:4, SEQ ID NO:1, SEQ ID NO:3, SEQ ID NO:5, and SEQ ID NO:6 or part thereof in a sample from said individual, and/or
b) determining the transcriptional expression level of at least one gene selected from the group consisting of C1orf114 (SEQ ID NO:2), HAPLN3 (SEQ ID NO:4), AOX1 (SEQ ID NO:1), GAS6 (SEQ ID NO:3), ST6GALNAC3 (SEQ ID NO:5) and ZNF660 (SEQ ID NO:6), or nucleotide sequence having at least 90% sequence identity with at least one nucleotide sequence selected from the group consisting of SEQ ID NO:2, SEQ ID NO:4, SEQ ID NO:1, SEQ ID NO:3, SEQ ID NO:5, and SEQ ID NO:6 or part thereof in said sample and/or
c) determining the translational expression level of at least one gene selected from the group consisting of C1orf114 (SEQ ID NO:2), HAPLN3 (SEQ ID NO:4), AOX1 (SEQ ID NO:1), GAS6 (SEQ ID NO:3), ST6GALNAC3 (SEQ ID NO:5) and ZNF660 (SEQ ID NO:6), or nucleotide sequence having at least 90% sequence identity with at least one nucleotide sequence selected from the group consisting of SEQ ID NO:2, SEQ ID NO:4, SEQ ID NO:1, SEQ ID NO:3, SEQ ID NO:5, and SEQ ID NO:6 or part thereof in said sample
wherein the methylation level of i) and/or the transcriptional level of ii) and/or the translational expression level of iii) is indicative of prostate cancer progression.

[0297] In another aspect the invention concerns a method for assisting in monitoring and/or for monitoring the progression of prostate cancer from a silent/indolent to an aggressive prostate cancer in an individual having developed prostate cancer comprising the steps of:

a) determining the methylation level of at least one gene selected from the group consisting of C1orf114 (SEQ ID NO:2), HAPLN3 (SEQ ID NO:4), AOX1 (SEQ ID NO:1), GAS6 (SEQ ID NO:3), ST6GALNAC3 (SEQ ID NO:5) and ZNF660 (SEQ ID NO:6) or determining the methylation level of at least one nucleotide sequence having at least 90% sequence identity with a nucleotide sequence selected from the group consisting of SEQ ID NO:2, SEQ ID NO:4, SEQ ID NO:1, SEQ ID NO:3, SEQ ID NO:5, and SEQ ID NO:6 or part thereof in a sample from said individual, and/or
b) determining the transcriptional expression level of at least one gene selected from the group consisting of C1orf114 (SEQ ID NO:2), HAPLN3 (SEQ ID NO:4), AOX1 (SEQ ID NO:1), GAS6 (SEQ ID NO:3), ST6GALNAC3 (SEQ ID NO:5) and ZNF660 (SEQ ID NO:6), or nucleotide sequence having at least 90% sequence identity with at least one nucleotide sequence selected from the group consisting of SEQ ID NO:2, SEQ ID NO:4, SEQ ID NO:1, SEQ ID NO:3, SEQ ID NO:5, and SEQ ID NO:6 or part thereof in said sample and/or
c) determining the translational expression level of at least one gene selected from the group consisting of C1orf114 (SEQ ID NO:2), HAPLN3 (SEQ ID NO:4), AOX1 (SEQ ID NO:1), GAS6 (SEQ ID NO:3), ST6GALNAC3 (SEQ ID NO:5) and ZNF660 (SEQ ID NO:6), or nucleotide sequence having at least 90% sequence identity with at least one nucleotide sequence selected from the group consisting of SEQ ID NO:2, SEQ ID NO:4, SEQ ID NO:1, SEQ ID NO:3, SEQ ID NO:5, and SEQ ID NO:6 or part thereof in said sample
wherein increased methylation level of a) and/or decreased transcriptional level of b) and/or decreased translational expression level of c) is indicative of the progression of prostate cancer from a silent/indolent to an aggressive prostate cancer.

[0298] In yet another aspect the invention concerns a method for assisting in determining and/or determining the treatment regime of an individual having developed prostate cancer comprising the steps of:

a) determining the methylation level of at least one gene selected from the group consisting of C1orf114 (SEQ ID NO:2), HAPLN3 (SEQ ID NO:4), AOX1 (SEQ ID NO:1), GAS6 (SEQ ID NO:3), ST6GALNAC3 (SEQ ID NO:5) and ZNF660 (SEQ ID NO:6) or determining the methylation level of at least one nucleotide sequence having at least 90% sequence identity with a nucleotide sequence selected from the group consisting of SEQ ID NO:2, SEQ ID NO:4, SEQ ID NO:1, SEQ ID NO:3, SEQ ID NO:5, and SEQ ID NO:6 or part thereof in a sample from said individual, and/or
b) determining the transcriptional expression level of at least one gene selected from the group consisting of C1orf114 (SEQ ID NO:2), HAPLN3 (SEQ ID NO:4), AOX1 (SEQ ID NO:1), GAS6 (SEQ ID NO:3), ST6GALNAC3 (SEQ ID NO:5) and ZNF660 (SEQ ID NO:6), or nucleotide sequence having at least 90% sequence identity with at least one nucleotide sequence selected from the group consisting of SEQ ID NO:2, SEQ ID NO:4, SEQ ID NO:1, SEQ ID NO:3, SEQ ID NO:5, and SEQ ID NO:6 or part thereof in said sample and/or
c) determining the translational expression level of at least one gene selected from the group consisting of C1orf114 (SEQ ID NO:2), HAPLN3 (SEQ ID NO:4), AOX1 (SEQ ID NO:1), GAS6 (SEQ ID NO:3), ST6GALNAC3 (SEQ ID NO:5) and ZNF660 (SEQ ID NO:6), or nucleotide sequence having at least 90% sequence identity with at least one nucleotide sequence selected from the group consisting of SEQ ID NO:2, SEQ ID NO:4, SEQ ID NO:1, SEQ ID NO:3, SEQ ID NO:5, and SEQ ID NO:6 or part thereof in said sample
wherein the methylation level of a) and/or the transcriptional level of b) and/or the translational expression level of c) is indicative of the treatment regime to be offered to the individual having developed prostate cancer.

[0299] In addition to the above discussed diagnostic and prognostic methods respectively, the present invention can also be applied for use in the treatment of prostate cancer. Thus in one aspect the invention concerns a method of treating a prostate cancer patient comprising determining at least one clinical parameter for said patient, determining the status of at least one gene selected from the group consisting of C1orf114 (SEQ ID NO:2), HAPLN3 (SEQ ID NO:4), AOX1 (SEQ ID NO:1), GAS6 (SEQ ID NO:3), ST6GALNAC3 (SEQ ID NO:5) and ZNF660 (SEQ ID NO:6), in a sample obtained from the patient, and (a) recommending, prescribing or initiating active treatment if said patient has at least one risk-associated clinical parameter and an elevated status for said gene, or (b) recommending, prescribing or initiating watchful waiting if said patient has neither a risk-associated clinical parameter nor an elevated status for said gene or genes.

[0300] The invention furthermore concerns tool for assessing status of a certain gene of interest. Thus in one aspect, the invention concerns the use of a plurality of oligonucleotides for determining the expression level of a panel of genes, where said panel comprises two or more biomarkers selected from:
[0301] I′) the nucleotide sequence of SEQ ID NO:1 (AOX1); or
[0302] I″) a nucleotide sequence being complementary to SEQ ID NO: 1; or
[0303] I″′) a nucleotide sequence having at least 90% sequence identity to any one of I′ or I″; or
[0304] I″″) a fragment of any one of I′, I″ or I″′, wherein the fragment comprises at least 15 consecutive nucleotides of any one of I′, I″ or I″′; and
[0305] II′) the nucleotide sequence of SEQ ID NO:2 (C1orf114); or
[0306] II″) a nucleotide sequence being complementary to SEQ ID NO: 2; or
[0307] II″′) a nucleotide sequence having at least 90% sequence identity to any one of II′ or II″; or
[0308] II″″) a fragment of any one of II′, II″ or II″′, wherein the fragment comprises at least 15 consecutive nucleotides of any one of I′, I″ or I″′; and
[0309] III′) the nucleotide sequence of SEQ ID NO:3 (GAS6); or
[0310] III″) a nucleotide sequence being complementary to SEQ ID NO: 3; or
[0311] III″′) a nucleotide sequence having at least 90% sequence identity to any one of III′ or III″′; or
[0312] III″″) a fragment of any one of III′, III″ or III″′, wherein the fragment comprises at least 15 consecutive nucleotides of any one of III′, III″ or III″′; and
[0313] IV′) the nucleotide sequence of SEQ ID NO:4 (HAPLN3); or
[0314] IV″) a nucleotide sequence being complementary to SEQ ID NO: 4; or
[0315] IV″′) a nucleotide sequence having at least 90% sequence identity to any one of IV′ or IV″; or
[0316] IV″″) a fragment of any one of IV′, IV″ or IV″′, wherein the fragment comprises at least 15 consecutive nucleotides of any one of IV′, IV″ or IV″′; and
[0317] V′) the nucleotide sequence of SEQ ID NO:5 (ST6GALNAC3 (SEQ ID NO:5)); or
[0318] V″) a nucleotide sequence being complementary to SEQ ID NO: 5; or
[0319] V″′) a nucleotide sequence having at least 90% sequence identity to any one of V′ or V″; or
[0320] V″″) a fragment of any one of V′, V″ or V″′, wherein the fragment comprises at least 15 consecutive nucleotides of any one of V′, V″ or V″′; and
[0321] VI′) the nucleotide sequence of SEQ ID NO:6 (ZNF660); or
[0322] VI″) a nucleotide sequence being complementary to SEQ ID NO: 6; or
[0323] VI″′) a nucleotide sequence having at least 90% sequence identity to any one of VI′ or VI″; or
[0324] VI″″) a fragment of any one of VI′, VI″ or VI″′, wherein the fragment comprises at least 15 consecutive nucleotides of any one of VI′, VI″ or VI″′;
[0325] for the manufacture of a diagnostic product useful to determine the prognosis or likelihood of recurrence of prostate cancer in an individual.

[0326] In order to assist clinicians, the diagnostic and/or prognostic uses may be implemented in a computer. In one such aspect, the present invention concerns a system for predicting the prognosis of an individual with prostate cancer, comprising:
[0327] a) means for analysing the methylation level, transcriptional level, and/or translational expression levels of one or more biomarkers in a sample obtained from said individual, and
[0328] b) means for estimating the probability for a patient with prostate cancer of surviving for a certain period of time,
[0329] wherein said biomarker comprises one or more nucleotide sequences selected from the group consisting of:
[0330] I′) the nucleotide sequence of SEQ ID NO:1 (AOX1); or
[0331] I″) a nucleotide sequence being complementary to SEQ ID NO: 1; or
[0332] I″′) a nucleotide sequence having at least 90% sequence identity to any one of I′ or I″; or
[0333] I″″) a fragment of any one of I′, I″ or I″′, wherein the fragment comprises at least 15 consecutive nucleotides of any one of I′, I″ or I″′; and
[0334] II′) the nucleotide sequence of SEQ ID NO:2 (C1orf114); or
[0335] II″) a nucleotide sequence being complementary to SEQ ID NO: 2; or
[0336] II″′) a nucleotide sequence having at least 90% sequence identity to any one of II′ or II″; or
[0337] II″″) a fragment of any one of II′, II″ or II″′, wherein the fragment comprises at least 15 consecutive nucleotides of any one of I′, I″ or I″′; and
[0338] III′) the nucleotide sequence of SEQ ID NO:3 (GAS6); or
[0339] III″) a nucleotide sequence being complementary to SEQ ID NO: 3; or
[0340] III″′) a nucleotide sequence having at least 90% sequence identity to any one of III′ or III″′; or
[0341] III″″) a fragment of any one of III′, III″ or III″′, wherein the fragment comprises at least 15 consecutive nucleotides of any one of III′, III″ or III″′; and
[0342] IV′) the nucleotide sequence of SEQ ID NO:4 (HAPLN3); or
[0343] IV″) a nucleotide sequence being complementary to SEQ ID NO: 4; or
[0344] IV″′) a nucleotide sequence having at least 90% sequence identity to any one of IV′ or IV″; or
[0345] IV″″) a fragment of any one of IV′, IV″ or IV″′, wherein the fragment comprises at least 15 consecutive nucleotides of any one of IV′, IV″ or IV″′; and
[0346] V′) the nucleotide sequence of SEQ ID NO:5 (ST6GALNAC3 (SEQ ID NO:5)); or
[0347] V″) a nucleotide sequence being complementary to SEQ ID NO: 5; or
[0348] V″′) a nucleotide sequence having at least 90% sequence identity to any one of V′ or V″; or
[0349] V″″) a fragment of any one of V′, V″ or V″′, wherein the fragment comprises at least 15 consecutive nucleotides of any one of V′, V″ or V″′; and
[0350] VI′) the nucleotide sequence of SEQ ID NO:6 (ZNF660); or
[0351] VI″) a nucleotide sequence being complementary to SEQ ID NO: 6; or
[0352] VI″′) a nucleotide sequence having at least 90% sequence identity to any one of VI′ or VI″; or
[0353] VI″″) a fragment of any one of VI′, VI″ or VI″′, wherein the fragment comprises at least 15 consecutive nucleotides of any one of VI′, VI″ or VI″′.

[0354] In one aspect the invention concerns a computer readable medium comprising a computer program product having, said computer program product providing a system for predicting the prognosis of an individual, said computer program product comprising means for carrying out any of the steps of the methods outlined herein above.

[0355] In a related aspect, the invention concerns an apparatus for predicting a probability of disease recurrence in a patient with prostate cancer following a radical prostatectomy, which apparatus comprises: a) a correlation of a set of pre-operative factors for each of a plurality of persons previously diagnosed with prostatic cancer and having been treated by radical prostatectomy with the incidence of recurrence of prostatic cancer for each person of the plurality of persons, wherein the set of pre-operative factors comprises pre-treatment methylation level, transcriptional level, and/or translational expression levels of one or more genes selected from the group consisting of C1orf114 (SEQ ID NO:2), HAPLN3 (SEQ ID NO:4), AOX1 (SEQ ID NO:1), GAS6 (SEQ ID NO:3), ST6GALNAC3 (SEQ ID NO:5) and ZNF660 (SEQ ID NO:6), and optionally one or more of pre-treatment PSA level, primary Gleason grade or secondary Gleason grade; and b) a means for comparing an identical set of pre-operative factors determined from a patient diagnosed as having prostate cancer to the correlation to predict the quantitative probability of recurrence of prostate cancer in the patient following radical prostatectomy.

[0356] The invention furthermore in one aspect concerns a method for predicting a probability of recurrence of prostate cancer in a patient following radical prostatectomy, comprising correlating a set of pre-operative factors for the patient to a functional representation of a set of pre-operative factors determined for each of a plurality of persons previously diagnosed with prostatic cancer and having been treated by radical prostatectomy, so as to yield a value for total points for the patient, which set of factors for each of a plurality of persons is correlated with the incidence of recurrence of prostatic cancer for each person in the plurality of persons, wherein the set of pre-operative factors comprises pre-treatment methylation level, transcriptional level, and/or translational expression levels of one or more genes selected from the group consisting of: C1orf114 (SEQ ID NO:2), HAPLN3 (SEQ ID NO:4), AOX1 (SEQ ID NO:1), GAS6 (SEQ ID NO:3), ST6GALNAC3 (SEQ ID NO:5) and ZNF660 (SEQ ID NO:6), and optionally one or more of pre-treatment PSA level, primary Gleason grade or secondary Gleason grade, wherein the functional representation comprises a scale for each of pre-treatment methylation level, transcriptional level, and/or translational expression levels of one or more genes selected from the group consisting of C1orf114 (SEQ ID NO:2), HAPLN3 (SEQ ID NO:4), AOX1 (SEQ ID NO:1), GAS6 (SEQ ID NO:3), ST6GALNAC3 (SEQ ID NO:5) and ZNF660 (SEQ ID NO:6), and optionally a scale for one or more of pre-treatment PSA level, primary Gleason grade or secondary Gleason grade, a points scale, a total points scale, and a predictor scale, wherein the scales for pre-treatment methylation level, transcriptional level, and/or translational expression levels of one or more genes selected from the group consisting of C1orf114 (SEQ ID NO:2), HAPLN3 (SEQ ID NO:4), AOX1 (SEQ ID NO:1), GAS6 (SEQ ID NO:3), ST6GALNAC3 (SEQ ID NO:5) and ZNF660 (SEQ ID NO:6), and optionally one or more of pre-treatment PSA level, primary Gleason grade or secondary Gleason grade, each have values on the scales which can be correlated with values on the points scale, and wherein the total points scale has values which may be correlated with values on the predictor scale; and b) correlating the value on the total points scale for the patient with a value on the predictor scale to predict the quantitative probability of recurrence of prostatic cancer in the patient following radical prostatectomy.

### DESCRIPTION OF DRAWINGS

[0357] FIG. 1. Cluster analysis, methylation frequencies of candidate genes and characterization of the C1orf114 promoter region. A Unsupervised clustering of samples based on most variably methylated CpG sites across all patient samples (variance>0.03) using the correlation algorithm of GenomeStudio. B Infinium β-values of 9 adjacent normal (ADJ-N), 5 localized prostate cancer (RP) and 4 metastatic prostate cancer (MPC, primary tumour) samples for the six methylation marker candidates as well as methylation frequencies found by bisulfite sequencing of DNA purified from 31 fresh-frozen macro-dissected prostate tissue specimens ADJ-N (n=5), benign prostatic hyperplasia (BPH) (n=6), RP (n=10) and MPCs (n=10). Each bar represents the β-value (Infinium data) or the percentage of methylated CpGs in each patient sample (bisulfite sequencing data). White bars: ADJ-N or BPH, light blue bars: RP, dark blue bars: MPC samples. Black line: median. *P<0.01, **P<0.001 Mann Whitney U-test. Black dots indicate methylation frequency of most methylated sequence in each patient sample analyzed by bisulfite sequencing. C Characterization of the C1orf114 promoter region and RNA expression in BPH1 and PC3 cell lines. H3K4me3 and H3K27me3 were normalized to GAPDH and COL2A1 H3K4me3 and H3K27me3 levels, respectively, in the same cell lines. DNA methylation (qMSP data) normalized to MYOD1 and RNA expression normalized to UBC was determined in untreated or 5-aza-dC treated cells.

[0358] FIG. 2. Diagnostic potential of candidate methylation markers. ROC analysis of non-malignant samples (ADJ-N and BPH) (n=35) against RP samples (n=293). Left panel: dotplots illustrating methylation levels of non-malignant and RP samples. Black line: median. **P<0.0001 Mann-Whitney U test. Right panel: ROC curves using data displayed in dotplots. AUC: area under the curve.

[0359] FIG. 3. Diagram of CpG sites differentially methylated between non-malignant and cancer samples and heatmaps showing all differentially methylated CpG sites between PC and non-malignant samples. A All genes differentially methylated in PC versus ADJ-N samples, divided into hyper- and hypo-methylated genes as well as CpG island associated/non-CpG island associated based on the annotations provided by Illumina. B Heatmaps displaying significantly differentially methylated CpG sites between non-malignant and PC samples (P<0.01, Mann-Whitney U test and Δβ>0.3). CpG sites divided into groups by localization relative to CpG islands based on the annotation provided by Illumina.

[0360] FIG. 4. Schematic drawing of promoter structure and localization of bisulfite sequencing and quantitative methylation specific assays. Chromosomal coordinates, positions of CpG islands (green bars) and transcription start sites (bent arrows) downloaded from the UCSC genome browser, Genome build 36/hg18. Red triangles: Illumina CpG sites differentially methylated in PC samples compared to ADJ-N samples, blue triangles: Illumina CpG sites not differentially methylated. Black bars: localization of bisulfite sequencing assays. Grey bars: localization of quantitative methylation specific PCRs.

[0361] FIG. 5. Illumina β-values for CpG sites, bisulfite sequencing and qMSP data for three cell lines. Left: grey bars represent Illumina β-values in the cell lines for CpG sites associated with the candidate genes, middle: bisulfite sequencing of part of the corresponding CpG island. Each line represents one clone. Open circles: un-methylated CpG sites, black circles: methylated CpG sites, no circle: the base (C/T) could not be determined unambiguously. Red boxes: location of the Illumina CpG sites. Green boxes (A-D): CpG sites encompassed in the qMSP primer-/probesets depicted as arrows and bars below (F: forward primer, P: probe, R: reverse primer). Primers and probes are not drawn to scale. Left (A-D): qMSP results for cell lines calibrated to a standard curve of fully methylated DNA and normalized to MYOD1.

[0362] FIG. 6. Examples of bisulfite sequencing of patient samples. Representative bisulfite sequencing results for AOX1, C1orf114, GAS6, HAPLN3, ST6GALNAC3 and ZNF660 in three ADJ-Ns (adjacent normal derived from radical prostatectomy samples), three BPHs (benign prostatic hyperplasia derived from transurethral resections of the prostate), three RPs (clinically localized prostate cancer derived from radical prostatectomy specimens) and three MPCs (metastatic prostate cancer (primary tumour)). Each line represents one clone. Open circles: un-methylated CpG sites, black circles: methylated CpG sites, no circle: the base was not determined unambiguously.

[0363] FIG. 7. Methylation levels of individual candidate markers in cohort 1 divided into sample types. DNA was purified from FFPE tissue. Dots: relative quantity of methylated DNA/relative quantity of MYOD1. ADJ-N (n=18): adjacent normal derived from radical prostatectomy samples. BPH (n=15): benign prostatic hyperplasia derived from transurethral resections of the prostate (TURP). PIN (n=11): prostatic intraepithelial neoplasia derived from radical prostatectomy samples. RP (n=319): clinically localized prostate cancer derived from radical prostatectomy specimens, the 319 patients include 26 patients which received endocrine therapy and were therefore not included in any further analyses. CRPC (n=28): castrate refractory prostate cancer from TURP. MPC (n=17): metastatic PC (primary tumour) from TURP. Grey bar: median. * Significantly different from RP (P<0.05). **Significantly different from RP (P<0.001), Mann-Whitney U test.

[0364] FIG. 8. Heatmap summarizing methylation levels of individual markers. Each marker was divided into 10 equally large groups according to methylation level, each group was sequentially scored (group scores from 1 to 10) and color coded. Only patients with PSA recurrence within 48 months/no recurrence within 48 months after radical prostatectomy were included. Sum: the sum of the group scores for all seven markers, further divided into groups. Recurrence rate: the percentage of patients in each sum group experiencing recurrence after radical prostatectomy.

[0365] FIG. 9. Kaplan-Meier plots of combinations of markers. A, B: AOX1, C1orf114 and HAPLN3 methylation scores were divided into high and low methylation based on ROC analysis as described in FIG. 12, and a combined score based on all three markers was generated for each patient sample. AOX1/C1orf114/HAPLN3=0: low meth (low risk/low methylation in all three markers), AOX1/C1orf114/HAPLN3=1: high meth (high risk/high methylation in one or more of the three markers). A: Cohort 1. B: Cohort 2.

[0366] FIG. 10. H3K4me3, H3K27me3, DNA methylation and RNA expression in prostate and prostate cancer cell lines. DNA methylation analysis was performed by qMSP analysis and normalized to MYOD1. RNA expression was normalized to UBC. DNA methylation and RNA expression were both investigated in untreated cells and in cells treated with 5-aza-dC. H3K4me3 is presented as % of input relative to % of input for GAPDH (positive control) in the same cell line. H3K27me3 is presented as % of input relative to % of input for COL2A1 (positive control) in the same cell line. H3K4me3 and H3K27me3 levels were investigated in untreated cells only. Notes for AOX1: The AOX1 gene has several transcription start sites, only expression of the transcript initiated at the hypermethylated CpG island is correlated with DNA methylation, thus upon hypermethylation of the CpG island AOX1 is still transcribed from down-stream transcription start sites (data not shown).

[0367] FIG. 11. Methylation levels of individual candidate markers in cohort 1 and 2 divided into groups by clinicopathological parameters. Only RP samples included. Dots: relative quantity of methylated DNA/relative quantity of MYOD1. A Cohort 1 and B Cohort 2 methylation levels divided into two groups: Gleason sum≦6 Gleason sum>6. C Cohort 1 and D Cohort 2 methylation levels divided into two groups: T-stage≦2 and T-stage>2. E Cohort1 and F Cohort 2: Dotplot depicting the association of pre-operative PSA levels (ng/mL) with methylation levels, Spearman's rho and P-value given for each gene. * Groups significantly different (P<0.05). **Groups significantly different (P<0.001), Mann-Whitney U test.

[0368] FIG. 12. Kaplan-Meier plots with time to PSA recurrence as endpoint. A: Cohort 1. Samples were divided into a high and low methylation group based on ROC analyses of recurrence/no recurrence within 48 months of radical prostatectomy. B: Cohort 2. Samples were divided into a high and low methylation based on cut-offs (fractions) defined in cohort 1. Log rank test P-value, and log rank test P-value corrected for multiple testing according to Hochberg in parentheses given in each plot.

### DETAILED DESCRIPTION OF THE INVENTION

### Definitions

[0369] The term “biomarker” as used herein refers to a gene or a nucleotide sequence, wherein the methylation level, methylation incidence, transcriptional expression level and/or translational expression level indicate the presence or the absence of prostate cancer. In one preferred embodiment the biomarker is selected from the group consisting of AOX1 (SEQ ID NO:1), C1orf114 (SEQ ID NO:2), GAS6 (SEQ ID NO:3), HAPLN3 (SEQ ID NO:4), ST6GALNAC3 (SEQ ID NO:5) and ZNF660 (SEQ ID NO:6) or of a nucleotide sequence having at least 90% sequence identity with a nucleotide sequence selected from the group consisting of SEQ ID NO:1, SEQ ID NO:2, SEQ ID NO:3, SEQ ID NO:4, SEQ ID NO:5 and SEQ ID NO:6. The term “biomarker” may be used interchangeably with “marker”.

[0370] The term “fragment” as used herein refers to a fragment comprising at least 15 consecutive nucleotides of any one of said SEQ ID NO:s 1, 2, 3, 4, 5 or 6; such as a fragment comprising at least 20 consecutive nucleotides, such as a fragment comprising at least 25 consecutive nucleotides, such as a fragment comprising at least 30 consecutive nucleotides, such as a fragment comprising at least 35 consecutive nucleotides, such as a fragment comprising at least 40 consecutive nucleotides, such as a fragment comprising at least 45 consecutive nucleotides, such as a fragment comprising at least 50 consecutive nucleotides, such as a fragment comprising at least 55 consecutive nucleotides, such as a fragment comprising at least 60 consecutive nucleotides, such as a fragment comprising at least 65 consecutive nucleotides, such as a fragment comprising at least 70 consecutive nucleotides, such as a fragment comprising at least 75 consecutive nucleotides, such as a fragment comprising at least 80 consecutive nucleotides, such as a fragment comprising at least 85 consecutive nucleotides, such as a fragment comprising at least 90 consecutive nucleotides, such as a fragment comprising at least 95 consecutive nucleotides, such as a fragment comprising at least 100 consecutive nucleotides, such as a fragment comprising at least 150 consecutive nucleotides, such as a fragment comprising at least 200 consecutive nucleotides, such as a fragment comprising at least 250 consecutive nucleotides, such as a fragment comprising at least 300 consecutive nucleotides, such as a fragment comprising at least 350 consecutive nucleotides, such as a fragment comprising at least 400 consecutive nucleotides, such as a fragment comprising at least 450 consecutive nucleotides, such as a fragment comprising at least 500 consecutive nucleotides, such as a fragment comprising at least 600 consecutive nucleotides, such as a fragment comprising at least 700 consecutive nucleotides, such as a fragment comprising at least 800 consecutive nucleotides, such as a fragment comprising at least 900 consecutive nucleotides, such as a fragment comprising at least 1000 consecutive nucleotides, such as a fragment comprising at least 2000 consecutive nucleotides, such as a fragment comprising at least 3000 consecutive nucleotides, such as a fragment comprising at least 4000 consecutive nucleotides, such as a fragment comprising at least 5000 consecutive nucleotides, such as a fragment comprising at least 6000 consecutive nucleotides, such as a fragment comprising at least 7000 consecutive nucleotides, such as a fragment comprising at least 8000 consecutive nucleotides, such as a fragment comprising at least 9000 consecutive nucleotides, such as a fragment comprising at least 10000 or more consecutive nucleotides of any one of said SEQ ID NO:s 1, 2, 3, 4, 5 or 6 or said complementary sequence or said variant thereof.

[0371] The term “methylation status” as used herein refers to the methylation level such as the methylation degree and/or the methylation incidence of a gene.

[0372] The term ‘assisting’ as used to describe the methods herein is to emphasise that the methods herein are directed at the step of gathering data to assist in the diagnosis, prediction, and/or prognosis of prostate cancer. Accordingly, methods for assisting in such methods are not to be construed as diagnostic methods practised on the human body per se.

[0373] The term ‘individual’ as used herein refers to a mammal, such as a human being, e.g. a male human being, such as a male human being afflicted with prostate cancer. The term individual may in certain embodiments refer to a patient.

[0374] The terms ‘prediction, predictive, predicting’ are used herein as terms for predicting the outcome or disease progression following intervention for example in the form of surgery, medication etc. For example such an intervention may be radical prostatectomy.

[0375] The term “progression of prostate cancer” as used herein refers to the progression of the course of disease and/or the progression of the individual stages or grades of prostate cancer. The stage of prostate cancer may be defined using the TMN system as described elsewhere herein. The grade of prostate cancer by be defined using the Gleason grading system as described elsewhere herein.

[0376] The term “absence of prostate cancer” as used herein refers to a stage wherein prostate cancer cannot be detected by taking a tissue sample from the prostate gland and examine the tissue sample under a microscope to determine whether cancer cells are present. The absence of cancer cells indicates the absence of prostate cancer.

[0377] The term “presence of prostate cancer” as used herein refers to a stage wherein prostate cancer can be detected by taking a tissue sample from the prostate gland and examine the tissue sample under a microscope to determine whether cancer cells are present. The presence of cancer cells indicates the presence of prostate cancer.

[0378] The term “methylation” or “DNA methylation” as used herein refers to the addition of a methyl group to the 5 position of the cytosine pyrimidine ring. The methylation reaction involves flipping a target cytosine out of an intact double helix thereby allowing the transfer of a methyl group from S-adenosylmethionine in a cleft of the enzyme DNA (cystosine-5)-methyltransferase to form 5-methylcytosine (5-mCyt).

[0379] The term “hypermethylation” as used herein refers to an increase in the methylation of cytosine residues in DNA when compared to an unmethylated DNA sample

[0380] The term “expression level” as used herein refers to the level of transcripts or part thereof, or protein or part thereof in a given sample, for example in a tissue sample. The level of protein can be determined by for example immunohistochemistry or other methods using antibodies that specifically recognize protein or fragment thereof. The level of transcript is determined by for example quantitative RT-PCR with normalisation to at least one relevant other gene.

[0381] A nucleotide is herein defined as a monomer of RNA or DNA. A nucleotide is a ribose or a deoxyribose ring attached to both a base and a phosphate group. Both mono-, di-, and tri-phosphate nucleosides are referred to as nucleotides.

[0382] The term “dinucleotide” as used herein refers to two sequential nucleotides. The dinucleotide may be comprised in an oligonucleotide or a polynucleotide. In particular, the dinucleotide CpG, which denotes a cytosine linked to a guanine by a phosphodiester bond, may be comprised in an oligonucleotide according to the present invention. A CpG dinucleotide is also herein referred to as a CpG site.

### Prostate Cancer

[0383] The present inventors have found that the genes AOX1, C1orf114, GAS6, HAPLN3, ST6GALNAC3 and ZNF660 are useful as biomarkers for prostate cancer for use in a method for assisting in diagnosing and/or for diagnosing prostate cancer in an individual and/or a method for assisting in prognosing and/or for prognosing the disease progression of prostate cancer in an individual having developed prostate cancer and/or a method for assisting in predicting and/or for predicting the outcome of prostate cancer in an individual having developed prostate cancer and/or a method for assisting in monitoring and/or for monitoring the effect of treatment on prostate cancer progression in an individual having developed prostate cancer and being treated for said prostate cancer and/or a method for assisting in monitoring and/or for monitoring the progression of prostate cancer from a silent/indolent to an aggressive prostate cancer in an individual having developed prostate cancer and/or a method for assisting in determining and/or determining the treatment regime of an individual having developed prostate cancer.

[0384] Prostate cancer is a disease wherein cancer develops in the prostate gland of the male reproductive system. Thus, prostate cancer is classified as an adenocarcinoma (glandular cancer) in which normal secretorial prostate gland cells mutate into cancer cells. The region of prostate gland where the adenocarcinoma is most common is the peripheral zone. Initially, small clumps of cancer cells remain confined to otherwise normal prostate glands, a condition known as carcinoma in situ or prostatic intraepithelial neoplasia (PIN). Although PIN has not been proven to be a cancer precursor, it is closely associated with cancer. Over time these cancer cells begin to multiply and spread to the surrounding prostate tissue, known as the stroma, forming a tumour. Eventually, the tumour may grow large enough to invade nearby organs such as the seminal vesicles or the rectum, or the tumour cells may develop the ability to travel in the bloodstream and lymphatic system. Prostate cancer is a malignant neoplasm because it displays the three key malignant properties of cancers: Uncontrolled growth (division beyond the normal limits), invasion (intrusion on and destruction of adjacent tissues), and sometimes metastasis (spread to other locations in the body via lymph or blood). Prostate cancer most commonly metastasizes to the bones, lymph nodes, rectum, and bladder.

[0385] Prostate cancer is evaluated by the stage of the cancer i.e., how much the cancer has spread. As for the marker in the present invention, knowledge of the stage is useful in defining the prognosis of prostate cancer and for deciding on treatment regimes. The three stage TNM system (Tumour/Nodes/Metastases) is widely used for staging prostate cancer. The system makes use of information regarding the size of the tumour, the number of involved lymph nodes, and the presence of any other metastases.

[0386] The most important distinction is whether or not the cancer is still confined to the prostate. In the TNM system, clinical T1 and T2 cancers are found only in the prostate, while T3 and T4 cancers have spread elsewhere. The following terms of the TNM system are used to stage a prostate cancer:

T—primary tumour

| | |
|---|---|
| Tx | Primary tumour cannot be assessed |
| T0 | No evidence of primary tumour |
| T1 | Clinically inapparent tumour neither palpable nor visible by imaging: |
| 1a | Tumour incidental histologic finding in 5% or less of tissue resected |
| 1b | Tumour incidental histologic finding in more than 5% of tissue |
| | resected |
| 1c | Tumour identified by needle biopsy (e.g. because of elevated PSA) |
| T2 | Tumour confined within the prostate¹: |
| 2a | Tumour involves one-half of one lobe or less |
| 2b | Tumour involves more than one-half of one lobe but not both lobes |
| 2c | Tumour involves both lobes |
| T3 | Tumour extends through the prostatic capsule²: |
| 3a | Extracapsular extension in periprostatic tissue (unilateral or bilateral) |
| 3b | Invasion of the seminal vesicle(s) |
| T4 | Tumour is fixed or invades adjacent structures other than the |
| | seminal vesicles: bladder neck, external sphincter, rectum, |
| | levator muscles, or pelvic wall³ |

¹Tumour found in one or both lobes by needle biopsy, but not palpable or visible by imaging, is classified as T1c.
²invasion into the prostatic apex but not beyond the prostate is not classified as T3, but as T2.
³If radical prostatectomy shows that the bladder neck contains microscopic tumour, this must be classified as T3a.

N—Regional lymph nodes

| | |
|---|---|
| Nx | Regional lymph nodes cannot be assessed |
| N0 | No regional lymph node metastases |
| N1 | Metastasis in regional lymph nodes |

M—Distant metastasis

| | |
|---|---|
| Mx | Distant metastasis cannot be assessed |
| M0 | No distant metastasis |
| M1 | Distant metastasis |
| 1a | Non-regional lymph nodes |
| 1b | Bone(s) |
| 1c | Other site(s) |

[0387] Tissue samples are examined microscopically to determine the features of any cancer identified. The so-called Gleason-score is used to help evaluating the prognosis of individuals having developed prostate cancer. Upon examination of biopsy samples under a microscope a pathologist assigns grades to the most common tumour pattern of the sample. The two grades are added together to get a Gleason score. The grades range from 1 to 5, with 5 having the worst prognosis. The Gleason scores range from 2 to 10, with 10 having the worst prognosis.

[0388] Gleason scores are associated with the following features: Grade 1—The cancerous prostate closely resembles normal prostate tissue. The glands are small, well-formed, and closely packed; Grade 2—The tissue still has well-formed glands, but they are larger and have more tissue between them; Grade 3—The tissue still has recognizable glands, but the cells are darker. At high magnification, some of these cells have left the glands and are beginning to invade the surrounding tissue; Grade 4—The tissue has few recognizable glands. Many cells are invading the surrounding tissue; Grade 5—The tissue does not have recognizable glands. There are often just sheets of cells throughout the surrounding tissue.

### Samples

[0389] The sample that is used in the methods of the present invention may be in a form suitable to allow analysis by the skilled artisan. The samples according to the present invention may be selected from a tissue sample, or from body fluid samples such as samples selected from the group consisting of blood, plasma, serum, semen and urine.

[0390] In a preferred embodiment of the present invention the sample is selected from the group consisting of tissue samples, preferably a prostate sample or the sample is selected from the group consisting of blood, plasma, serum, and semen samples. In another preferred embodiment the sample is a urine sample.

[0391] In case of urine samples a preferred urine sample is a urine sample taken after the prostate gland has been massaged prior to the sampling in order to transfer as many cells of prostate origin to the urine.

[0392] In another particular embodiment of the present invention, the sample is a tissue sample, such as a biopsy of the tissue, or a superficial sample scraped from the tissue. In another embodiment the sample may be prepared by forming a suspension of cells made from the tissue. The sample may, however, also be an extract obtained from the tissue or obtained from a cell suspension made from the tissue.

[0393] In a preferred embodiment the sample used in the methods of the present invention is a biopsy of the prostate gland or resected prostate tissue. Biopsy or tissue samples may also be obtained by transurethral resection of the prostate (TURP).

[0394] In one embodiment the sample is a histopathologically negative biopsy. A histopathologically negative biopsy is a biopsy or tissue sample, wherein it has been determined by microscopic examination of the tissue that the sample is negative, i.e. the individual from which the sample is taken does not have prostate cancer.

[0395] Working with tumour material in general requires biopsies or body fluids suspected to comprise relevant cells. Working with RNA in general requires freshly frozen or immediately processed biopsies, or chemical pretreatment of the biopsy. Apart from the cancer tissue, biopsies do normally contain many different cell types, such as cells present in the blood, connective and muscle tissue, endothelium etc. In the case of DNA studies, microdissection or laser capture are methods of choice, however the time-dependent degradation of RNA may make it difficult to perform manipulation of the tissue for more than a few minutes. The sample may be fresh or frozen, or treated with chemicals.

### Determining the Methylation Level

[0396] The methods of the present invention comprises a step of determining the methylation degree and/or the methylation incidence of at least one gene selected from the group consisting of AOX1 (SEQ ID NO:1), C1orf114 (SEQ ID NO:2), GAS6 (SEQ ID NO:3), HAPLN3 (SEQ ID NO:4), ST6GALNAC3 (SEQ ID NO:5) and ZNF660 (SEQ ID NO:6), or nucleotide sequence having at least 85% sequence identity, such as at least 90% sequence identity, at least 95% sequence identity, such as at least 99% sequence identity with a nucleotide sequence selected from the group consisting of SEQ ID NO:1, SEQ ID NO:2, SEQ ID NO:3, SEQ ID NO:4, SEQ ID NO:5 and SEQ ID NO:6 or part thereof.

[0397] In the present invention, an increased methylation level, such as an increased methylation degree and/or methylation incidence, is indicative of the presence of prostate cancer and a decreased methylation degree and/or methylation incidence is indicative of the absence of prostate cancer.

[0398] The methylation degree as used herein refers to an average value of the percentage of all CpG dinucleotides on a region of the AOX1, C1orf114, GAS6, HAPLN3, ST6GALNAC3 and ZNF660 gene being methylated in all cells of a given sample. The sample may be any of the samples mentioned herein and above in the section “Samples”, such as for example a tissue sample, a blood, serum, plasma, semen or urine sample. The sample may therefore comprise a variety of cells, such as for example a mixture of prostate cancer cells and non-malignant cells. By way of example, if there are 10 CpG dinucleotides on a given region of the AOX1 gene, and 2 CpG dinucleotides are methylated, then the methylation degree is 20%. However, if only 10% of the cells in a sample is prostate cancer cells, the methylation degree is 2%. Therefore, the methylation degree in a urine sample from an individual having prostate cancer may typically be lower than the methylation degree in a tissue sample from the same individual, because the fraction of malignant cells in a urine sample are typically smaller than in a tissue sample.

[0399] The methylation degree may also be measured relative to a control sample. In one embodiment the control sample is an unmethylated nucleotide sequence having at least 90% sequence identity with SEQ ID NO: 1, SEQ ID NO: 2, SEQ ID NO: 3, SEQ ID NO: 4, SEQ ID NO: 5 and/or SEQ ID NO: 6 or part thereof. In another embodiment the control sample is a fully methylated nucleotide sequence having at least 90% sequence identity with SEQ ID NO: 1, SEQ ID NO: 2, SEQ ID NO: 3, SEQ ID NO: 4, SEQ ID NO: 5 and/or SEQ ID NO: 6 or part thereof. In yet another embodiment the control sample is obtained from a healthy individual from the same tissue or body fluid as the sample of said individual.

[0400] In one embodiment the methylation degree is determined over the entire AOX1 gene according to SEQ ID NO:1.

[0401] In another embodiment the methylation degree is determined over a stretch of 10 to 90000 consecutive basepairs, such as of consecutive 10 to 70000 basepairs such as for example of 10 to 50000 consecutive basepairs, such as of 10 to 30000 consecutive basepairs, such as for example of 10 to 10000 consecutive basepairs, such as of 10 to 7000 consecutive basepairs, such as of 10 to 5000 consecutive basepairs, such as of 10 to 4000 consecutive basepairs, such as of 10 to 3000 consecutive basepairs, such as for example of 10 to 2000 consecutive basepairs, such as of 10 to 1000 consecutive basepairs, such as for example of 10 to 500 consecutive basepairs, such as of 10 to 400 consecutive basepairs, such as of 10 to 300 consecutive basepairs, such as for example of 10 to 200 consecutive basepairs, such as of 10 to 100 consecutive basepairs, of the AOX1 gene according to SEQ ID NO:1.

[0402] In another embodiment the methylation degree is determined over a stretch of 100 to 1000 consecutive basepairs, such as for example of 100 to 800 consecutive basepairs, such as of 100 to 600 consecutive basepairs, such as for example of 100 to 200 consecutive basepairs of the AOX gene according to SEQ ID NO:1.

[0403] In one preferred embodiment the methylation degree is determined over a stretch of 100 to 500 consecutive base pairs of the AOX gene according to SEQ ID NO:1.

[0404] In one embodiment the methylation degree is determined in the region of basepair no. 1 to basepair no. 45000 of SEQ ID NO: 1, preferably the methylation degree is determined over a stretch of in the range of 100 to 1000 consecutive bp, for example in the range of 100 to 500 consecutive bp, such as in the range of 100 to 200 consecutive by within the region of base pair no. 1 to base pair no. 45000 of SEQ ID NO: 1, more preferably over the entire region of base pair no. 1 to base pair no. 45000 of SEQ ID NO: 1.

[0405] In another embodiment the methylation degree is determined in the region of base pair no. 45000 to base pair no. 90487 of SEQ ID NO: 1, preferably the methylation degree is determined over a stretch of in the range of 100 to 1000 consecutive bp, for example in the range of 100 to 500 consecutive bp, such as in the range of 100 to 200 consecutive by within the region of basepair no. 45000 to basepair no. 90487 of SEQ ID NO: 1, more preferably over the entire region of basepair no. 45000 to basepair no. 90487 of SEQ ID NO: 1.

[0406] In yet another embodiment the methylation degree is determined in the region of basepair no. 1 to basepair no. 15000 of SEQ ID NO: 1, preferably the methylation degree is determined over a stretch of in the range of 100 to 1000 consecutive basepairs, for example in the range of 100 to 500 consecutive basepairs, such as in the range of 100 to 200 consecutive basepairs within the region of basepair no. 1 to basepair no. 15000 of SEQ ID NO: 1, more preferably over the entire region of basepair no. 1 to basepair no. 15000 of SEQ ID NO: 1.

[0407] In a further embodiment the methylation degree is determined in the region of basepair no. 15000 to basepair no. 30000 of SEQ ID NO: 1, preferably the methylation degree is determined over a stretch of in the range of 100 to 1000 consecutive basepairs, for example in the range of 100 to 500 consecutive basepairs, such as in the range of 100 to 200 consecutive basepairs within the region of basepair no. 15000 to basepair no. 30000 of SEQ ID NO: 1, more preferably over the entire region of basepair no. 15000 to basepair no. 30000 of SEQ ID NO: 1.

[0408] In another embodiment the methylation degree is determined in the region of basepair no. 30000 to basepair no. 45000 of SEQ ID NO: 1, preferably the methylation degree is determined over a stretch of in the range of 100 to 1000 consecutive basepairs, for example in the range of 100 to 500 consecutive basepairs, such as in the range of 100 to 200 consecutive basepairs within the region of basepair no. 30000 to basepair no. 45000 of SEQ ID NO: 1, more preferably over the entire region of basepair no. 30000 to basepair no. 45000 of SEQ ID NO: 1.

[0409] In yet another embodiment the methylation degree is determined in the region of basepair no. 45000 to basepair no. 60000 of SEQ ID NO: 1, preferably the methylation degree is determined over a stretch of in the range of 100 to 1000 consecutive basepairs, for example in the range of 100 to 500 consecutive basepairs, such as in the range of 100 to 200 consecutive basepairs within the region of basepair no. 45000 to base pair no. 60000 of SEQ ID NO: 1, more preferably over the entire region of basepair no. 45000 to basepair no. 60000 of SEQ ID NO: 1.

[0410] In another embodiment the methylation degree is determined in the region of basepair no. 60000 to basepair no. 75000 of SEQ ID NO: 1, preferably the methylation degree is determined over a stretch of in the range of 100 to 1000 consecutive basepairs, for example in the range of 100 to 500 consecutive basepairs, such as in the range of 100 to 200 consecutive basepairs within the region of base pair no. 60000 to basepair no. 75000 of SEQ ID NO: 1, more preferably over the entire region of basepair no. 60000 to basepair no. 75000 of SEQ ID NO: 1.

[0411] In another embodiment the methylation degree is determined in the region of basepair no. 75000 to basepair no. 90487 of SEQ ID NO: 1, preferably the methylation degree is determined over a stretch of in the range of 100 to 1000 consecutive basepairs, for example in the range of 100 to 500 consecutive basepairs, such as in the range of 100 to 200 consecutive basepairs within the region of base pair no. 75000 to basepair no. 90487 of SEQ ID NO: 1, more preferably over the entire region of basepair no. 75000 to basepair no. 90487 of SEQ ID NO: 1.

[0412] In one preferred embodiment the methylation degree is determined over a sequence of basepair no. 4000 to basepair no. 6000 of SEQ ID NO:1, or a sequence which is at least 90% identical to basepair no. 4000 to basepair no. 6000 of SEQ ID NO:1. It is also preferred that the methylation degree is determined over a stretch of in the range of 100 to 1000 consecutive basepairs, for example in the range of 100 to 500 consecutive basepairs, such as in the range of 100 to 200 consecutive basepairs within the region of base pair no. 4000 to basepair no. 6000 of SEQ ID NO: 1, more preferably over the entire region of basepair no. 4000 to basepair no. 6000 of SEQ ID NO: 1

[0413] In another preferred embodiment the methylation degree is determined over a sequence of at the most 800 basepairs, preferably at the most 500 basepairs comprising basepair no. 4907 to basepair no. 5374 of SEQ ID NO:1, or a sequence which is at least 90% identical to basepair no. 4907 to basepair no. 5374 of SEQ ID NO:1. Yet more preferably the methylation degree is determined over the stretch of basepair no. 4907 to basepair no. 5374 of SEQ ID NO:1, or a sequence which is at least 90% identical to basepair no. 4907 to basepair no. 5374 of SEQ ID NO:1.

[0414] In one preferred embodiment the methylation degree is determined over a part of the AOX1 gene comprising at least basepair no. 4907 to basepair no. 5374 of SEQ ID NO:1, or a sequence which is at least 90% identical to basepair no. 4907 to basepair no. 5374 of SEQ ID NO:1. In a particular embodiment the methylation degree is determined in at least a part of a region of the AOX1 gene comprising basepair no. 4907 to basepair no. 5374 of SEQ ID NO:1, or a sequence which is at least 90% identical to basepair no. 4907 to basepair no. 5374 of SEQ ID NO:1.

[0415] In one embodiment the methylation degree is determined over the entire C1orf114 gene according to SEQ ID NO:2.

[0416] In another embodiment the methylation degree is determined over a stretch of 10 to 37000 consecutive basepairs, such as for example of 10 to 30000 consecutive basepairs, such as of 10 to 10000 consecutive basepairs, such as of 10 to 5000 consecutive basepairs, such as of 10 to 4000 consecutive basepairs, such as of 10 to 3000 consecutive basepairs, such as for example of 10 to 2000 consecutive basepairs, such as of 10 to 1000 consecutive basepairs, such as for example of 10 to 500 consecutive basepairs, such as of 10 to 400 consecutive basepairs, such as of 10 to 300 consecutive basepairs, such as for example of 10 to 200 consecutive basepairs, such as of 10 to 100 consecutive basepairs, of the C1orf114 gene according to SEQ ID NO:2.

[0417] In another embodiment the methylation degree is determined over a stretch of 100 to 1000 consecutive basepairs, such as for example of 100 to 800 consecutive basepairs, such as of 100 to 600 consecutive basepairs, such as for example of 100 to 200 consecutive basepairs of the C1orf114 gene according to SEQ ID NO:2.

[0418] In one preferred embodiment the methylation degree is determined over a stretch of 100 to 500 consecutive base pairs of the C1orf114 gene according to SEQ ID NO:2.

[0419] In one embodiment the methylation degree is determined in the region of basepair no. 1 to basepair no. 20000 of SEQ ID NO: 2, preferably the methylation degree is determined over a stretch of in the range of 100 to 1000 consecutive bp, for example in the range of 100 to 500 consecutive bp, such as in the range of 100 to 200 consecutive by within the region of base pair no. 1 to base pair no. 20000 of SEQ ID NO: 2, more preferably over the entire region of base pair no. 1 to base pair no. 20000 of SEQ ID NO: 2.

[0420] In another embodiment the methylation degree is determined in the region of base pair no. 20000 to base pair no. 37557 of SEQ ID NO: 2, preferably the methylation degree is determined over a stretch of in the range of 100 to 1000 consecutive bp, for example in the range of 100 to 500 consecutive bp, such as in the range of 100 to 200 consecutive by within the region of basepair no. 20000 to basepair no. 37557 of SEQ ID NO: 2, more preferably over the entire region of basepair no. 20000 to basepair no. 37557 of SEQ ID NO: 2.

[0421] In yet another embodiment the methylation degree is determined in the region of basepair no. 1 to basepair no. 10000 of SEQ ID NO: 2, preferably the methylation degree is determined over a stretch of in the range of 100 to 1000 consecutive basepairs, for example in the range of 100 to 500 consecutive basepairs, such as in the range of 100 to 200 consecutive basepairs within the region of basepair no. 1 to basepair no. 10000 of SEQ ID NO: 2, more preferably over the entire region of basepair no. 1 to basepair no. 10000 of SEQ ID NO: 2.

[0422] In a further embodiment the methylation degree is determined in the region of basepair no. 10000 to basepair no. 20000 of SEQ ID NO: 2, preferably the methylation degree is determined over a stretch of in the range of 100 to 1000 consecutive basepairs, for example in the range of 100 to 500 consecutive basepairs, such as in the range of 100 to 200 consecutive basepairs within the region of basepair no. 10000 to basepair no. 20000 of SEQ ID NO: 2, more preferably over the entire region of basepair no. 10000 to basepair no. 20000 of SEQ ID NO: 2.

[0423] In another embodiment the methylation degree is determined in the region of basepair no. 20000 to basepair no. 30000 of SEQ ID NO: 2, preferably the methylation degree is determined over a stretch of in the range of 100 to 1000 consecutive basepairs, for example in the range of 100 to 500 consecutive basepairs, such as in the range of 100 to 200 consecutive basepairs within the region of basepair no. 20000 to basepair no. 30000 of SEQ ID NO: 2, more preferably over the entire region of basepair no. 20000 to basepair no. 30000 of SEQ ID NO: 2.

[0424] In yet another embodiment the methylation degree is determined in the region of basepair no. 30000 to basepair no. 37557 of SEQ ID NO: 2, preferably the methylation degree is determined over a stretch of in the range of 100 to 1000 consecutive basepairs, for example in the range of 100 to 500 consecutive basepairs, such as in the range of 100 to 200 consecutive basepairs within the region of basepair no. 30000 to base pair no. 37557 of SEQ ID NO: 2, more preferably over the entire region of basepair no. 30000 to basepair no. 37557 of SEQ ID NO: 2.

[0425] In one preferred embodiment the methylation degree is determined over a sequence of basepair no. 4000 to basepair no. 6000 of SEQ ID NO:2, or a sequence which is at least 90% identical to basepair no. 4000 to basepair no. 6000 of SEQ ID NO:2. It is also preferred that the methylation degree is determined over a stretch of in the range of 100 to 1000 consecutive basepairs, for example in the range of 100 to 500 consecutive basepairs, such as in the range of 100 to 200 consecutive basepairs within the region of base pair no. 4000 to basepair no. 6000 of SEQ ID NO: 2, more preferably over the entire region of basepair no. 4000 to basepair no. 6000 of SEQ ID NO: 2.

[0426] In another preferred embodiment the methylation degree is determined over a sequence of at the most 800 basepairs, preferably at the most 500 basepairs comprising basepair no. 4777 to basepair no. 5072 of SEQ ID NO:2, or a sequence which is at least 90% identical to basepair no. 4777 to basepair no. 5072 of SEQ ID NO:2. Yet more preferably the methylation degree is determined over the stretch of basepair no. 4777 to basepair no. 5072 of SEQ ID NO:2, or a sequence which is at least 90% identical to basepair no. 4777 to basepair no. 5072 of SEQ ID NO:2.

[0427] In one preferred embodiment the methylation degree is determined over a part of the C1orf114 gene comprising at least basepair no. 4777 to basepair no. 5072 of SEQ ID NO:2, or a sequence which is at least 90% identical to basepair no. 4777 to basepair no. 5072 of SEQ ID NO:2. In a particular embodiment the methylation degree is determined in at least a part of a region of the C1orf114 gene comprising basepair no. 4777 to basepair no. 5072 of SEQ ID NO:2, or a sequence which is at least 90% identical to basepair no. 4777 to basepair no. 5072 of SEQ ID NO:2.

[0428] In one embodiment the methylation degree is determined over the entire GAS6 gene according to SEQ ID NO:3.

[0429] In another embodiment the methylation degree is determined over a stretch of 10 to 48000 consecutive basepairs, such as for example of 10 to 40000 consecutive basepairs, such as of 10 to 30000 consecutive basepairs, such as for example of 10 to 20000 consecutive basepairs, such as of 10 to 10000 consecutive basepairs, such as of 10 to 5000 consecutive basepairs, such as of 10 to 4000 consecutive basepairs, such as of 10 to 3000 consecutive basepairs, such as for example of 10 to 2000 consecutive basepairs, such as of 10 to 1000 consecutive basepairs, such as for example of 10 to 500 consecutive basepairs, such as of 10 to 400 consecutive basepairs, such as of 10 to 300 consecutive basepairs, such as for example of 10 to 200 consecutive basepairs, such as of 10 to 100 consecutive basepairs, of the GAS6 gene according to SEQ ID NO:3.

[0430] In another embodiment the methylation degree is determined over a stretch of 100 to 1000 consecutive basepairs, such as for example of 100 to 800 consecutive basepairs, such as of 100 to 600 consecutive basepairs, such as for example of 100 to 200 consecutive basepairs of the GAS6 gene according to SEQ ID NO:3.

[0431] In one preferred embodiment the methylation degree is determined over a stretch of 100 to 500 consecutive base pairs of the GAS6 gene according to SEQ ID NO:3.

[0432] In one embodiment the methylation degree is determined in the region of basepair no. 1 to basepair no. 25000 of SEQ ID NO:3, preferably the methylation degree is determined over a stretch of in the range of 100 to 1000 consecutive bp, for example in the range of 100 to 500 consecutive bp, such as in the range of 100 to 200 consecutive by within the region of base pair no. 1 to base pair no. 25000 of SEQ ID NO: 3, more preferably over the entire region of base pair no. 1 to base pair no. 25000 of SEQ ID NO: 3.

[0433] In another embodiment the methylation degree is determined in the region of base pair no. 25000 to base pair no. 48525 of SEQ ID NO: 3, preferably the methylation degree is determined over a stretch of in the range of 100 to 1000 consecutive bp, for example in the range of 100 to 500 consecutive bp, such as in the range of 100 to 200 consecutive by within the region of basepair no. 25000 to basepair no. 48525 of SEQ ID NO: 3, more preferably over the entire region of basepair no. 25000 to basepair no. 48525 of SEQ ID NO: 3.

[0434] In yet another embodiment the methylation degree is determined in the region of basepair no. 1 to basepair no. 10000 of SEQ ID NO: 3, preferably the methylation degree is determined over a stretch of in the range of 100 to 1000 consecutive basepairs, for example in the range of 100 to 500 consecutive basepairs, such as in the range of 100 to 200 consecutive basepairs within the region of basepair no. 1 to basepair no. 10000 of SEQ ID NO: 3, more preferably over the entire region of basepair no. 1 to basepair no. 10000 of SEQ ID NO: 3.

[0435] In a further embodiment the methylation degree is determined in the region of basepair no. 10000 to basepair no. 20000 of SEQ ID NO: 3, preferably the methylation degree is determined over a stretch of in the range of 100 to 1000 consecutive basepairs, for example in the range of 100 to 500 consecutive basepairs, such as in the range of 100 to 200 consecutive basepairs within the region of basepair no. 10000 to basepair no. 20000 of SEQ ID NO: 3, more preferably over the entire region of basepair no. 10000 to basepair no. 20000 of SEQ ID NO: 3.

[0436] In another embodiment the methylation degree is determined in the region of basepair no. 20000 to basepair no. 30000 of SEQ ID NO: 3, preferably the methylation degree is determined over a stretch of in the range of 100 to 1000 consecutive basepairs, for example in the range of 100 to 500 consecutive basepairs, such as in the range of 100 to 200 consecutive basepairs within the region of basepair no. 20000 to basepair no. 30000 of SEQ ID NO: 3, more preferably over the entire region of basepair no. 20000 to basepair no. 30000 of SEQ ID NO: 3.

[0437] In yet another embodiment the methylation degree is determined in the region of basepair no. 30000 to basepair no. 40000 of SEQ ID NO: 3, preferably the methylation degree is determined over a stretch of in the range of 100 to 1000 consecutive basepairs, for example in the range of 100 to 500 consecutive basepairs, such as in the range of 100 to 200 consecutive basepairs within the region of basepair no. 30000 to base pair no. 40000 of SEQ ID NO: 3, more preferably over the entire region of basepair no. 30000 to basepair no. 40000 of SEQ ID NO: 3.

[0438] In another embodiment the methylation degree is determined in the region of basepair no. 40000 to basepair no. 48525 of SEQ ID NO: 3, preferably the methylation degree is determined over a stretch of in the range of 100 to 1000 consecutive basepairs, for example in the range of 100 to 500 consecutive basepairs, such as in the range of 100 to 200 consecutive basepairs within the region of basepair no. 40000 to base pair no. 48525 of SEQ ID NO: 3, more preferably over the entire region of basepair no. 40000 to basepair no. 48525 of SEQ ID NO: 3.

[0439] In one preferred embodiment the methylation degree is determined over a sequence of basepair no. 5000 to basepair no. 7000 of SEQ ID NO:3, or a sequence which is at least 90% identical to basepair no. 5000 to basepair no. 7000 of SEQ ID NO:3. It is also preferred that the methylation degree is determined over a stretch of in the range of 100 to 1000 consecutive basepairs, for example in the range of 100 to 500 consecutive basepairs, such as in the range of 100 to 200 consecutive basepairs within the region of base pair no. 5000 to basepair no. 7000 of SEQ ID NO: 3, more preferably over the entire region of basepair no. 5000 to basepair no. 7000 of SEQ ID NO: 3.

[0440] In another preferred embodiment the methylation degree is determined over a sequence of at the most 800 basepairs, preferably at the most 500 basepairs comprising basepair no. 5948 to basepair no. 6265 of SEQ ID NO:3, or a sequence which is at least 90% identical to basepair no. 5948 to basepair no. 6265 of SEQ ID NO:3. Yet more preferably the methylation degree is determined over the stretch of basepair no. 5948 to basepair no. 6265 of SEQ ID NO:2, or a sequence which is at least 90% identical to basepair no. 5948 to basepair no. 6265 of SEQ ID NO:3.

[0441] In one preferred embodiment the methylation degree is determined over a part of the GAS6 gene comprising at least basepair no. 5948 to basepair no. 6265 of SEQ ID NO:3, or a sequence which is at least 90% identical to basepair no. 5948 to basepair no. 6265 of SEQ ID NO:3. In a particular embodiment the methylation degree is determined in at least a part of a region of the GAS6 gene comprising basepair no. 5948 to basepair no. 6265 of SEQ ID NO:3, or a sequence which is at least 90% identical to basepair no. 5948 to basepair no. 6265 of SEQ ID NO:3.

[0442] In one embodiment the methylation degree is determined over the entire HAPLN3 gene according to SEQ ID NO:4.

[0443] In another embodiment the methylation degree is determined over a stretch of 10 to 23000 consecutive basepairs, such as for example of 10 to 15000 consecutive basepairs, such as of 10 to 10000 consecutive basepairs, such as of 10 to 5000 consecutive basepairs, such as of 10 to 4000 consecutive basepairs, such as of 10 to 3000 consecutive basepairs, such as for example of 10 to 2000 consecutive basepairs, such as of 10 to 1000 consecutive basepairs, such as for example of 10 to 500 consecutive basepairs, such as of 10 to 400 consecutive basepairs, such as of 10 to 300 consecutive basepairs, such as for example of 10 to 200 consecutive basepairs, such as of 10 to 100 consecutive basepairs, of the C1orf114 gene according to SEQ ID NO:4.

[0444] In another embodiment the methylation degree is determined over a stretch of 100 to 1000 consecutive basepairs, such as for example of 100 to 800 consecutive basepairs, such as of 100 to 500 consecutive basepairs, such as for example of 100 to 200 consecutive basepairs of the HAPLN3 gene according to SEQ ID NO:4.

[0445] In one preferred embodiment the methylation degree is determined over a stretch of 100 to 600 consecutive base pairs of the HAPLN3 gene according to SEQ ID NO:4.

[0446] In one embodiment the methylation degree is determined in the region of basepair no. 1 to basepair no. 10000 of SEQ ID NO: 4, preferably the methylation degree is determined over a stretch of in the range of 100 to 1000 consecutive bp, for example in the range of 100 to 500 consecutive bp, such as in the range of 100 to 200 consecutive by within the region of base pair no. 1 to base pair no. 10000 of SEQ ID NO: 4, more preferably over the entire region of base pair no. 1 to base pair no. 10000 of SEQ ID NO: 4.

[0447] In another embodiment the methylation degree is determined in the region of base pair no. 10000 to base pair no. 23252 of SEQ ID NO: 4, preferably the methylation degree is determined over a stretch of in the range of 100 to 1000 consecutive bp, for example in the range of 100 to 500 consecutive bp, such as in the range of 100 to 200 consecutive by within the region of basepair no. 10000 to basepair no. 23252 of SEQ ID NO: 4, more preferably over the entire region of basepair no. 10000 to basepair no. 23252 of SEQ ID NO: 4.

[0448] In yet another embodiment the methylation degree is determined in the region of basepair no. 1 to basepair no. 6000 of SEQ ID NO: 4, preferably the methylation degree is determined over a stretch of in the range of 100 to 1000 consecutive basepairs, for example in the range of 100 to 500 consecutive basepairs, such as in the range of 100 to 200 consecutive basepairs within the region of basepair no. 1 to basepair no. 6000 of SEQ ID NO: 4, more preferably over the entire region of basepair no. 1 to basepair no. 6000 of SEQ ID NO: 4.

[0449] In a further embodiment the methylation degree is determined in the region of basepair no. 6000 to basepair no. 12000 of SEQ ID NO: 4, preferably the methylation degree is determined over a stretch of in the range of 100 to 1000 consecutive basepairs, for example in the range of 100 to 500 consecutive basepairs, such as in the range of 100 to 200 consecutive basepairs within the region of basepair no. 6000 to basepair no. 12000 of SEQ ID NO: 4, more preferably over the entire region of basepair no. 6000 to basepair no. 12000 of SEQ ID NO: 4.

[0450] In another embodiment the methylation degree is determined in the region of basepair no. 12000 to basepair no. 18000 of SEQ ID NO: 4, preferably the methylation degree is determined over a stretch of in the range of 100 to 1000 consecutive basepairs, for example in the range of 100 to 500 consecutive basepairs, such as in the range of 100 to 200 consecutive basepairs within the region of basepair no. 12000 to basepair no. 18000 of SEQ ID NO: 4, more preferably over the entire region of basepair no. 12000 to basepair no. 18000 of SEQ ID NO: 4.

[0451] In yet another embodiment the methylation degree is determined in the region of basepair no. 18000 to basepair no. 23252 of SEQ ID NO: 4, preferably the methylation degree is determined over a stretch of in the range of 100 to 1000 consecutive basepairs, for example in the range of 100 to 500 consecutive basepairs, such as in the range of 100 to 200 consecutive basepairs within the region of basepair no. 18000 to base pair no. 23252 of SEQ ID NO: 4, more preferably over the entire region of basepair no. 18000 to basepair no. 23252 of SEQ ID NO: 4.

[0452] In one preferred embodiment the methylation degree is determined over a sequence of basepair no. 4000 to basepair no. 6000 of SEQ ID NO:4, or a sequence which is at least 90% identical to basepair no. 4000 to basepair no. 6000 of SEQ ID NO:4. It is also preferred that the methylation degree is determined over a stretch of in the range of 100 to 1000 consecutive basepairs, for example in the range of 100 to 500 consecutive basepairs, such as in the range of 100 to 200 consecutive basepairs within the region of base pair no. 4000 to basepair no. 6000 of SEQ ID NO: 4, more preferably over the entire region of basepair no. 4000 to basepair no. 6000 of SEQ ID NO: 4.

[0453] In another preferred embodiment the methylation degree is determined over a sequence of at the most 800 basepairs, preferably at the most 500 basepairs comprising basepair no. 4896 to basepair no. 5402 of SEQ ID NO:4, or a sequence which is at least 90% identical to basepair no. 4896 to basepair no. 5402 of SEQ ID NO:4. Yet more preferably the methylation degree is determined over the stretch of basepair no. 4896 to basepair no. 5402 of SEQ ID NO:4, or a sequence which is at least 90% identical to basepair no. 4896 to basepair no. 5402 of SEQ ID NO:4.

[0454] In one preferred embodiment the methylation degree is determined over a part of the HAPLN3 gene comprising at least basepair no. 4896 to basepair no. 5402 of SEQ ID NO:4, or a sequence which is at least 90% identical to basepair no. 4896 to basepair no. 5402 of SEQ ID NO:4. In a particular embodiment the methylation degree is determined in at least a part of a region of the HAPLN3 gene comprising basepair no. 4896 to basepair no. 5402 of SEQ ID NO:4, or a sequence which is at least 90% identical to basepair no. 4896 to basepair no. 5402 of SEQ ID NO:4.

[0455] In one embodiment the methylation degree is determined over the entire ST6GALNAC3 gene according to SEQ ID NO:5.

[0456] In another embodiment the methylation degree is determined over a stretch of 10 to 1.122.000 consecutive basepairs, such as of consecutive 10 to 700.000 basepairs such as for example of 10 to 400.000 consecutive basepairs, such as of 10 to 100.000 consecutive basepairs, such as 50.000 consecutive basepairs, such as for example of 10 to 10000 consecutive basepairs, such as of 10 to 7000 consecutive basepairs, such as of 10 to 5000 consecutive basepairs, such as of 10 to 4000 consecutive basepairs, such as of 10 to 3000 consecutive basepairs, such as for example of 10 to 2000 consecutive basepairs, such as of 10 to 1000 consecutive basepairs, such as for example of 10 to 500 consecutive basepairs, such as of 10 to 400 consecutive basepairs, such as of 10 to 300 consecutive basepairs, such as for example of 10 to 200 consecutive basepairs, such as of 10 to 100 consecutive basepairs, of the ST6GALNAC3 gene according to SEQ ID NO:5.

[0457] In another embodiment the methylation degree is determined over a stretch of 100 to 1000 consecutive basepairs, such as for example of 100 to 800 consecutive basepairs, such as of 100 to 600 consecutive basepairs, such as for example of 100 to 200 consecutive basepairs of the ST6GALNAC3 gene according to SEQ ID NO:5.

[0458] In one preferred embodiment the methylation degree is determined over a stretch of 100 to 500 consecutive base pairs of the ST6GALNAC3 gene according to SEQ ID NO:5.

[0459] In one embodiment the methylation degree is determined in the region of basepair no. 1 to basepair no. 500.000 of SEQ ID NO: 5, preferably the methylation degree is determined over a stretch of in the range of 100 to 1000 consecutive bp, for example in the range of 100 to 500 consecutive bp, such as in the range of 100 to 200 consecutive by within the region of base pair no. 1 to base pair no. 500.000 of SEQ ID NO: 5, more preferably over the entire region of base pair no. 1 to base pair no. 45000 of SEQ ID NO: 5.

[0460] In another embodiment the methylation degree is determined in the region of base pair no. 500.000 to base pair no. 1.122.510 of SEQ ID NO: 1, preferably the methylation degree is determined over a stretch of in the range of 100 to 1000 consecutive bp, for example in the range of 100 to 500 consecutive bp, such as in the range of 100 to 200 consecutive by within the region of basepair no. 500.000 to basepair no. 1.122.510 of SEQ ID NO: 5, more preferably over the entire region of basepair no. 500.000 to basepair no. 1.122.510 of SEQ ID NO: 5.

[0461] In yet another embodiment the methylation degree is determined in the region of basepair no. 1 to basepair no. 10000 of SEQ ID NO: 5, preferably the methylation degree is determined over a stretch of in the range of 100 to 1000 consecutive basepairs, for example in the range of 100 to 500 consecutive basepairs, such as in the range of 100 to 200 consecutive basepairs within the region of basepair no. 1 to basepair no. 10000 of SEQ ID NO: 5, more preferably over the entire region of basepair no. 1 to basepair no. 10000 of SEQ ID NO: 5.

[0462] In a further embodiment the methylation degree is determined in the region of basepair no. 10000 to basepair no. 100.000 of SEQ ID NO: 5, preferably the methylation degree is determined over a stretch of in the range of 100 to 1000 consecutive basepairs, for example in the range of 100 to 500 consecutive basepairs, such as in the range of 100 to 200 consecutive basepairs within the region of basepair no. 10000 to basepair no. 100.000 of SEQ ID NO: 5, more preferably over the entire region of basepair no. 10000 to basepair no. 100.000 of SEQ ID NO: 5.

[0463] In another embodiment the methylation degree is determined in the region of basepair no. 200.000 to basepair no. 400.000 of SEQ ID NO: 5, preferably the methylation degree is determined over a stretch of in the range of 100 to 1000 consecutive basepairs, for example in the range of 100 to 500 consecutive basepairs, such as in the range of 100 to 200 consecutive basepairs within the region of basepair no. 200.000 to basepair no. 400.000 of SEQ ID NO: 5, more preferably over the entire region of basepair no. 200.000 to basepair no. 400.000 of SEQ ID NO: 5.

[0464] In yet another embodiment the methylation degree is determined in the region of basepair no. 400.000 to basepair no. 700.000 of SEQ ID NO: 5, preferably the methylation degree is determined over a stretch of in the range of 100 to 1000 consecutive basepairs, for example in the range of 100 to 500 consecutive basepairs, such as in the range of 100 to 200 consecutive basepairs within the region of basepair no. 400.000 to basepair no. 700.000 of SEQ ID NO: 5, more preferably over the entire region of basepair no. 400.000 to basepair no. 700.000 of SEQ ID NO: 5.

[0465] In another embodiment the methylation degree is determined in the region of basepair no. 700.000 to basepair no. 1.122.510 of SEQ ID NO: 5, preferably the methylation degree is determined over a stretch of in the range of 100 to 1000 consecutive basepairs, for example in the range of 100 to 500 consecutive basepairs, such as in the range of 100 to 200 consecutive basepairs within the region of base pair no. 700.000 to basepair no. 1.122.510 of SEQ ID NO: 5, more preferably over the entire region of basepair no. 700.000 to basepair no. 1.122.510 of SEQ ID NO: 5.

[0466] In one preferred embodiment the methylation degree is determined over a sequence of basepair no. 4000 to basepair no. 6000 of SEQ ID NO:5, or a sequence which is at least 90% identical to basepair no. 4000 to basepair no. 6000 of SEQ ID NO:1. It is also preferred that the methylation degree is determined over a stretch of in the range of 100 to 1000 consecutive basepairs, for example in the range of 100 to 500 consecutive basepairs, such as in the range of 100 to 200 consecutive basepairs within the region of base pair no. 4000 to basepair no. 6000 of SEQ ID NO: 5, more preferably over the entire region of basepair no. 4000 to basepair no. 6000 of SEQ ID NO: 5

[0467] In another preferred embodiment the methylation degree is determined over a sequence of at the most 800 basepairs, preferably at the most 500 basepairs comprising basepair no. 5097 to basepair no. 5186 of SEQ ID NO:5, or a sequence which is at least 90% identical to basepair no. 5097 to basepair no. 5186 of SEQ ID NO:5. Yet more preferably the methylation degree is determined over the stretch of basepair no. 5097 to basepair no. 5186 of SEQ ID NO:5, or a sequence which is at least 90% identical to basepair no. 5097 to basepair no. 5186 of SEQ ID NO:5.

[0468] In one preferred embodiment the methylation degree is determined over a part of the ST6GALNAC3 gene comprising at least basepair no. 5097 to basepair no. 5186 of SEQ ID NO:5, or a sequence which is at least 90% identical to basepair no. 5097 to basepair no. 5186 of SEQ ID NO:5. In a particular embodiment the methylation degree is determined in at least a part of a region of the ST6GALNAC3 gene comprising basepair no. 5097 to basepair no. 5186 of SEQ ID NO:5, or a sequence which is at least 90% identical to basepair no. 5097 to basepair no. 5186 of SEQ ID NO:5.

[0469] In one embodiment the methylation degree is determined over the entire ZNF660 gene according to SEQ ID NO:6.

[0470] In another embodiment the methylation degree is determined over a stretch of 10 to 16000 consecutive basepairs, such as for example of 10 to 13000 consecutive basepairs, such as of 10 to 10000 consecutive basepairs, such as for example of 10 to 7000 consecutive basepairs, such as of 10 to 5000 consecutive basepairs, such as of 10 to 4000 consecutive basepairs, such as of 10 to 3000 consecutive basepairs, such as for example of 10 to 2000 consecutive basepairs, such as of 10 to 1000 consecutive basepairs, such as for example of 10 to 500 consecutive basepairs, such as of 10 to 400 consecutive basepairs, such as of 10 to 300 consecutive basepairs, such as for example of 10 to 200 consecutive basepairs, such as of 10 to 100 consecutive basepairs, of the ZNF660 gene according to SEQ ID NO:6.

[0471] In another embodiment the methylation degree is determined over a stretch of 100 to 1000 consecutive basepairs, such as for example of 100 to 800 consecutive basepairs, such as of 100 to 600 consecutive basepairs, such as for example of 100 to 200 consecutive basepairs of the ZNF660 gene according to SEQ ID NO:6.

[0472] In one preferred embodiment the methylation degree is determined over a stretch of 100 to 500 consecutive base pairs of the ZNF660 gene according to SEQ ID NO:6.

[0473] In one embodiment the methylation degree is determined in the region of basepair no. 1 to basepair no. 8000 of SEQ ID NO: 6, preferably the methylation degree is determined over a stretch of in the range of 100 to 1000 consecutive bp, for example in the range of 100 to 500 consecutive bp, such as in the range of 100 to 200 consecutive by within the region of base pair no. 1 to base pair no. 8000 of SEQ ID NO: 6, more preferably over the entire region of base pair no. 1 to base pair no. 8000 of SEQ ID NO: 6.

[0474] In another embodiment the methylation degree is determined in the region of base pair no. 8000 to base pair no. 16102 of SEQ ID NO: 6, preferably the methylation degree is determined over a stretch of in the range of 100 to 1000 consecutive bp, for example in the range of 100 to 500 consecutive bp, such as in the range of 100 to 200 consecutive by within the region of basepair no. 8000 to base pair no. 16102 of SEQ ID NO: 6, more preferably over the entire region of basepair no. 8000 to base pair no. 16102 of SEQ ID NO: 6.

[0475] In yet another embodiment the methylation degree is determined in the region of basepair no. 1 to basepair no. 4000 of SEQ ID NO: 6, preferably the methylation degree is determined over a stretch of in the range of 100 to 1000 consecutive basepairs, for example in the range of 100 to 500 consecutive basepairs, such as in the range of 100 to 200 consecutive basepairs within the region of basepair no. 1 to basepair no. 4000 of SEQ ID NO: 6, more preferably over the entire region of basepair no. 1 to basepair no. 4000 of SEQ ID NO: 6.

[0476] In a further embodiment the methylation degree is determined in the region of basepair no. 4000 to basepair no. 8000 of SEQ ID NO: 6, preferably the methylation degree is determined over a stretch of in the range of 100 to 1000 consecutive basepairs, for example in the range of 100 to 500 consecutive basepairs, such as in the range of 100 to 200 consecutive basepairs within the region of basepair no. 4000 to basepair no. 8000 of SEQ ID NO: 6, more preferably over the entire region of basepair no. 4000 to basepair no. 8000 of SEQ ID NO: 6.

[0477] In another embodiment the methylation degree is determined in the region of basepair no. 8000 to basepair no. 12000 of SEQ ID NO: 6, preferably the methylation degree is determined over a stretch of in the range of 100 to 1000 consecutive basepairs, for example in the range of 100 to 500 consecutive basepairs, such as in the range of 100 to 200 consecutive basepairs within the region of basepair no. 8000 to basepair no. 12000 of SEQ ID NO: 6, more preferably over the entire region of basepair no. 8000 to basepair no. 12000 of SEQ ID NO: 6.

[0478] In yet another embodiment the methylation degree is determined in the region of basepair no. 12000 to basepair no. 16102 of SEQ ID NO: 6, preferably the methylation degree is determined over a stretch of in the range of 100 to 1000 consecutive basepairs, for example in the range of 100 to 500 consecutive basepairs, such as in the range of 100 to 200 consecutive basepairs within the region of basepair no. 12000 to basepair no. 16102 of SEQ ID NO: 6, more preferably over the entire region of basepair no. 12000 to basepair no. 16102 of SEQ ID NO: 6.

[0479] In one preferred embodiment the methylation degree is determined over a sequence of basepair no. 4000 to basepair no. 6000 of SEQ ID NO:6, or a sequence which is at least 90% identical to basepair no. 4000 to basepair no. 6000 of SEQ ID NO:6. It is also preferred that the methylation degree is determined over a stretch of in the range of 100 to 1000 consecutive basepairs, for example in the range of 100 to 500 consecutive basepairs, such as in the range of 100 to 200 consecutive basepairs within the region of base pair no. 4000 to basepair no. 6000 of SEQ ID NO: 6, more preferably over the entire region of basepair no. 4000 to basepair no. 6000 of SEQ ID NO: 6.

[0480] In another preferred embodiment the methylation degree is determined over a sequence of at the most 800 basepairs, preferably at the most 500 basepairs comprising basepair no. 4923 to basepair no. 5225 of SEQ ID NO:6, or a sequence which is at least 90% identical to basepair no. 4923 to basepair no. 5225 of SEQ ID NO:6. Yet more preferably the methylation degree is determined over the stretch of basepair no. 4923 to basepair no. 5225 of SEQ ID NO:6, or a sequence which is at least 90% identical to basepair no. 4923 to basepair no. 5225 of SEQ ID NO:6.

[0481] In one preferred embodiment the methylation degree is determined over a part of the ZNF660 gene comprising at least basepair no. 4923 to basepair no. 5225 of SEQ ID NO:6, or a sequence which is at least 90% identical to basepair no. 4923 to basepair no. 5225 of SEQ ID NO:6. In a particular embodiment the methylation degree is determined in at least a part of a region of the ZNF660 gene comprising basepair no. 4923 to basepair no. 5225 of SEQ ID NO:6, or a sequence which is at least 90% identical to basepair no. 4923 to basepair no. 5225 of SEQ ID NO:6.

[0482] It is appreciated that the methylation degree of at least one CpG dinucleotide of SEQ ID NO:1, SEQ ID NO:2, SEQ ID NO:3, SEQ ID NO:4, SEQ ID NO:5 and/or SEQ ID NO:6 is determined, such as two, three, four, 5, 6, 7, 8, 9, 10, 11, 12, 13, 14, 15, 16, 17, 18, 19, 20, 21, 22, 23, 24, 25, 26, 27, 28, 29, 30, 31, 32, 33, 34, 35, 36, 37, 38, 39, 40, 41, 42, 43, 44, 45, 46, 47, 48, 49, 50, 55, 60, 65, 70, 75, 80, 85, 90, 95 or more than 100 CpG dinucleotides.

[0483] A methylation degree in a sample increased by at least 10% or for example at least 15%, 20%, 25%, 30%, 35%, 40%, 41%, 42%, 43%, 44%, 45%, 46%, 47%, 48%, 49%, 50%, 55%, 60%, 65%, 70%, 80%, 90%, 100% or even more, relative to previous measurements on the same individual, or to measurements on non-diseased tissue from the same individual, or relative to a standard level, is considered an increased methylation degree according to the present invention. Thus, as aforementioned, an increased methylation degree of the AOX1, C1orf114, GAS6, HAPLN3, ST6GALNAC3 and/or ZNF660 gene is indicative of the presence of prostate cancer.

[0484] A methylation degree in a sample increased by at least 1.5-fold or for example at least 2-fold, 3-fold, 5-fold, 10-fold or even more, relative to previous measurements on the same individual, or to measurements on non-diseased tissue from the same individual, or relative to a standard level, is considered an increased methylation degree according to the present invention. Thus, as aforementioned, an increased methylation degree of the AOX1, C1orf114, GAS6, HAPLN3, ST6GALNAC3 and/or ZNF660 gene is indicative of the presence of prostate cancer.

[0485] In one embodiment the methylation degree of a
[0486] gene selected from the group consisting of AOX1 (SEQ ID NO:1), C1orf114 (SEQ ID NO:2), GAS6 (SEQ ID NO:3), HAPLN3 (SEQ ID NO:4), ST6GALNAC3 (SEQ ID NO:5) and ZNF660 (SEQ ID NO:6) and/or
[0487] nucleotide sequence having at least 90% sequence identity with a nucleotide sequence selected from the group consisting of SEQ ID NO:1, SEQ ID NO:2, SEQ ID NO:3, SEQ ID NO:4, SEQ ID NO:5 and SEQ ID NO:6 or part thereof
   in a sample is considered to be increased and indicative of the presence of prostate cancer when said methylation degree is determined to be above 1%, such as for example 5%, such as 10%, such as for example 15%, such as 20%, such as for example 35%, such as 40%, such as for example 45%, such as 50%.

[0488] In one preferred embodiment the methylation degree of a
[0489] gene selected from the group consisting of AOX1 (SEQ ID NO:1), C1orf114 (SEQ ID NO:2), GAS6 (SEQ ID NO:3), HAPLN3 (SEQ ID NO:4), ST6GALNAC3 (SEQ ID NO:5) and ZNF660 (SEQ ID NO:6), and/or
[0490] nucleotide sequence having at least 90% sequence identity with a nucleotide sequence selected from the group consisting of SEQ ID NO:1, SEQ ID NO:2, SEQ ID NO:3, SEQ ID NO:4, SEQ ID NO:5 and SEQ ID NO:6 or part thereof
   in a sample is considered to be increased and indicative of the presence of prostate cancer when said methylation degree is determined to be above 15% such as for example 16%, such as 17%, such as for example 18%, such as 19%, when said sample is a tissue sample.

[0491] In another preferred embodiment the methylation degree of a
[0492] gene selected from the group consisting of AOX1 (SEQ ID NO:1), C1orf114 (SEQ ID NO:2), GAS6 (SEQ ID NO:3), HAPLN3 (SEQ ID NO:4), ST6GALNAC3 (SEQ ID NO:5) and ZNF660 (SEQ ID NO:6), and/or
[0493] nucleotide sequence having at least 90% sequence identity with a nucleotide sequence selected from the group consisting of SEQ ID NO:1, SEQ ID NO:2, SEQ ID NO:3, SEQ ID NO:4, SEQ ID NO:5 and SEQ ID NO:6 or part thereof
   in a sample is considered to be increased and indicative of the presence of prostate cancer when said methylation degree is determined to be above 21% such as for example 22%, such as 23%, such as for example 24%, such as 25%, when said sample is a tissue sample.

[0494] In a more preferred embodiment the methylation degree of a
[0495] gene selected from the group consisting of AOX1 (SEQ ID NO:1), C1orf114 (SEQ ID NO:2), GAS6 (SEQ ID NO:3), HAPLN3 (SEQ ID NO:4), ST6GALNAC3 (SEQ ID NO:5) and ZNF660 (SEQ ID NO:6), and/or
[0496] nucleotide sequence having at least 90% sequence identity with a nucleotide sequence selected from the group consisting of SEQ ID NO:1, SEQ ID NO:2, SEQ ID NO:3, SEQ ID NO:4, SEQ ID NO:5 and SEQ ID NO:6 or part thereof
   in a sample is considered to be increased and indicative of the presence of prostate cancer when said methylation degree is determined to be above 20%.

[0497] In a more preferred embodiment the methylation degree of a
[0498] gene selected from the group consisting of AOX1 (SEQ ID NO:1), C1orf114 (SEQ ID NO:2), GAS6 (SEQ ID NO:3), HAPLN3 (SEQ ID NO:4), ST6GALNAC3 (SEQ ID NO:5) and ZNF660 (SEQ ID NO:6), and/or
[0499] nucleotide sequence having at least 90% sequence identity with a nucleotide sequence selected from the group consisting of SEQ ID NO:1, SEQ ID NO:2, SEQ ID NO:3, SEQ ID NO:4, SEQ ID NO:5 and SEQ ID NO:6 or part thereof
   in a sample is considered to be increased and indicative of the presence of prostate cancer when said methylation degree is determined to be above 20%, when said sample is a tissue sample.

[0500] In a specific embodiment the tissue sample is a prostate tissue sample.

[0501] An increased methylation degree is exemplified in FIG. 1 where AOX1, C1orf114, GAS6, HAPLN3, ST6GALNAC3 and ZNF660 in the localized PC (RP) and metastatic PC (MPC) clinical tissue samples display increased methylation. Similarly, a decreased methylation degree is exemplified in FIG. 1 where AOX1, C1orf114, GAS6, HAPLN3, ST6GALNAC3 and ZNF660 in adjacent normal (ADJ-N) and benign prostatic hyperplasia (BPH) clinical tissue samples display decreased methylation.

[0502] In one embodiment the methylation degree of a
[0503] gene selected from the group consisting of AOX1 (SEQ ID NO:1), C1orf114 (SEQ ID NO:2), GAS6 (SEQ ID NO:3), HAPLN3 (SEQ ID NO:4), ST6GALNAC3 (SEQ ID NO:5) and ZNF660 (SEQ ID NO:6) and/or
[0504] nucleotide sequence having at least 90% sequence identity with a nucleotide sequence selected from the group consisting of SEQ ID NO:1, SEQ ID NO:2, SEQ ID NO:3, SEQ ID NO:4, SEQ ID NO:5 and SEQ ID NO:6 or part thereof
[0505] in a sample is considered to be increased and indicative of the presence of prostate cancer when said methylation degree is determined to be above 0.001%. such as for example 0.01%, such as 0.05%, such as for example 0.1%, such as 0.5%, such as for example 1%, such as 2%, such as for example 3%, such as 4%, such as for example 5%, such as 6%, such as for example 8%, such as 10%, such as for example 15%, such as 20%, such as for example 25%, such as 30%, such as for example 35%, such as 40%, such as for example 50%, when said sample is a body fluid sample.

[0506] The body fluid sample may be selected from the group consisting of urine, blood, plasma, serum and semen.

[0507] In one preferred embodiment the body fluid sample is a urine sample.

[0508] In one preferred embodiment the methylation degree of a
[0509] gene selected from the group consisting of AOX1 (SEQ ID NO:1), C1orf114 (SEQ ID NO:2), GAS6 (SEQ ID NO:3), HAPLN3 (SEQ ID NO:4), ST6GALNAC3 (SEQ ID NO:5) and ZNF660 (SEQ ID NO:6) and/or
[0510] nucleotide sequence having at least 90% sequence identity with a nucleotide sequence selected from the group consisting of SEQ ID NO:1, SEQ ID NO:2, SEQ ID NO:3, SEQ ID NO:4, SEQ ID NO:5 and SEQ ID NO:6 or part thereof
   in a sample is considered to be increased and indicative of the presence of prostate cancer when said methylation degree is determined to be above 0.01%, when said sample is a body fluid sample.

[0511] In one preferred embodiment the body fluid sample is a blood sample. In another preferred embodiment the body fluid sample is a urine sample.

[0512] Determining the methylation degree of one or more of the genes described herein in histopathologically negative biopsies may improve the early detection of prostate cancer. A histopathologically negative biopsy is a biopsy or tissue sample, wherein it has been determined by microscopic examination of the tissue that the sample is negative, i.e. the individual from which the sample is taken does not have prostate cancer. The biopsy sample can be a biopsy of the prostate gland or resected prostate tissue.

[0513] Thus, in a specific embodiment an increased methylation degree in histopathological cancer-negative biopsies is indicative of cancer-positive repeat biopsies. An increased methylation degree is as defined above.

[0514] In one embodiment the methylation degree of a
[0515] gene selected from the group consisting of AOX1 (SEQ ID NO:1), C1orf114 (SEQ ID NO:2), GAS6 (SEQ ID NO:3), HAPLN3 (SEQ ID NO:4), ST6GALNAC3 (SEQ ID NO:5) and ZNF660 (SEQ ID NO:6) and/or
[0516] nucleotide sequence having at least 90% sequence identity with a nucleotide sequence selected from the group consisting of SEQ ID NO:1, SEQ ID NO:2, SEQ ID NO:3, SEQ ID NO:4, SEQ ID NO:5 and SEQ ID NO:6 or part thereof
   in a sample is considered to be decreased and indicative of the absence of prostate cancer when said methylation degree is determined to be below 30% such as for example 25%, such as 15%, such as for example 10%, or such as 5% or such as for example 1%.

[0517] In one preferred embodiment the methylation degree of a
[0518] gene selected from the group consisting of AOX1 (SEQ ID NO:1), C1orf114 (SEQ ID NO:2), GAS6 (SEQ ID NO:3), HAPLN3 (SEQ ID NO:4), ST6GALNAC3 (SEQ ID NO:5) and ZNF660 (SEQ ID NO:6) and/or
[0519] nucleotide sequence having at least 90% sequence identity with a nucleotide sequence selected from the group consisting of SEQ ID NO:1, SEQ ID NO:2, SEQ ID NO:3, SEQ ID NO:4, SEQ ID NO:5 and SEQ ID NO:6 or part thereof
   in a sample is considered to be decreased and indicative of the absence of prostate cancer when said methylation degree is determined to be below 20%. In a preferred embodiment said sample is a tissue sample.

[0520] In another embodiment the methylation degree of a
[0521] gene selected from the group consisting of AOX1 (SEQ ID NO:1), C1 orf114 (SEQ ID NO:2), GAS6 (SEQ ID NO:3), HAPLN3 (SEQ ID NO:4), ST6GALNAC3 (SEQ ID NO:5) and ZNF660 (SEQ ID NO:6) and/or
[0522] nucleotide sequence having at least 90% sequence identity with a nucleotide sequence selected from the group consisting of SEQ ID NO:1, SEQ ID NO:2, SEQ ID NO:3, SEQ ID NO:4, SEQ ID NO:5 and SEQ ID NO:6 or part thereof
   in a sample is considered to be decreased and indicative of the absence of prostate cancer when said methylation degree is determined to be below 10% such as for example 8%, such as 6%, such as for example 4%, such as 2% or such as for example 1% or such as for example 0.5% or such as 0.1%, wherein said sample is a body fluid sample.

[0523] The body fluid sample may be selected from the group consisting of urine, blood, plasma, serum and semen. In one preferred embodiment the body fluid sample is a urine sample.

[0524] In one preferred embodiment the methylation degree of a
[0525] gene selected from the group consisting of AOX1 (SEQ ID NO:1), C1 orf114 (SEQ ID NO:2), GAS6 (SEQ ID NO:3), HAPLN3 (SEQ ID NO:4), ST6GALNAC3 (SEQ ID NO:5) and ZNF660 (SEQ ID NO:6) and/or
[0526] nucleotide sequence having at least 90% sequence identity with a nucleotide sequence selected from the group consisting of SEQ ID NO:1, SEQ ID NO:2, SEQ ID NO:3, SEQ ID NO:4, SEQ ID NO:5 and SEQ ID NO:6 or part thereof
   in a sample is considered to be decreased and indicative of the absence of prostate cancer when said methylation degree is determined to be below 0.1% is indicative of the absence of prostate cancer.

### Methylation Incidence

[0527] Another method for measuring the methylation level of the AOX1, C1orf114, GAS6, HAPLN3, ST6GALNAC3 and ZNF660 genes is by determining the methylation incidence. The methylation incidence refers to the percentage of DNA molecules in a given sample, wherein all or most of the CpG dinucleotides in a specific region of a gene selected from the group consisting of AOX1, C1orf114, GAS6, HAPLN3, ST6GALNAC3 and ZNF660 are methylated. Methylation of this specific region of said gene will indicate that the gene originates from a cell that is a PC cell. By way of example, if the methylation incidence of the AOX1 gene is 10% in a sample, then 10% of the DNA molecules in said sample have an AOXlgene which is fully or almost fully methylated in the region tested and consequently at least 10% of the DNA molecules in the sample originate from cells that are prostate cancer cells. Thus, the detection of one methylated AOX1, C1orf114, GAS6, HAPLN3, ST6GALNAC3 and/or ZNF660 gene will indicate the presence of a PC cell.

[0528] The methylation incidence may for example be determined using methylation specific PCR (MSP) or Real-time fluorescent MSP (described below). In MSP a primer or a fluorescent probe is typically designed to anneal to a site containing one or more methylated CpGs. Thus, this primer or probe will preferably anneal to a completely methylated target region. MSP is a highly sensitive method, which may detect one methylated gene among 10.000-100.000 unmethylated genes.

[0529] It is appreciated that the methylation incidence of at least one CpG dinucleotide of SEQ ID NO:1, SEQ ID NO:2, SEQ ID NO:3, SEQ ID NO:4, SEQ ID NO:5 and/or SEQ ID NO:6 is determined, such as two, three, four, 5, 6, 7, 8, 9 or more than 10 CpG dinucleotides.

[0530] The methylation incidence may be determined in same the gene regions as the methylation degrees as defined herein.

[0531] In a preferred embodiment the methylation incidence is determined over a part of the AOX1 gene comprising at least basepair no. 4907 to basepair no. 5374 of SEQ ID NO:1, or a sequence which is at least 90% identical to basepair no. 4907 to basepair no. 5374 of SEQ ID NO:1. In a particular embodiment the methylation incidence is determined in at least a part of a region of the AOX1 gene comprising basepair no. 4907 to basepair no. 5374 of SEQ ID NO:1, or a sequence which is at least 90% identical to basepair no. 4907 to basepair no. 5374 of SEQ ID NO:1.

[0532] In another preferred embodiment the methylation incidence is determined over a part of the C1orf114 gene comprising at least basepair no. 4777 to basepair no. 5072 of SEQ ID NO:2, or a sequence which is at least 90% identical to basepair no. 4777 to basepair no. 5072 of SEQ ID NO:2. In a particular embodiment the methylation incidence is determined in at least a part of a region of the C1orf114 gene comprising basepair no. 4777 to basepair no. 5072 of SEQ ID NO:2, or a sequence which is at least 90% identical to basepair no. 4777 to basepair no. 5072 of SEQ ID NO:2.

[0533] In yet another preferred embodiment the methylation incidence is determined over a part of the GAS6 gene comprising at least basepair no. 5948 to basepair no. 6265 of SEQ ID NO:3, or a sequence which is at least 90% identical to basepair no. 5948 to basepair no. 6265 of SEQ ID NO:3. In a particular embodiment the methylation incidence is determined in at least a part of a region of the GAS6 gene comprising basepair no. 5948 to basepair no. 6265 of SEQ ID NO:3, or a sequence which is at least 90% identical to basepair no. 5948 to basepair no. 6265 of SEQ ID NO:3.

[0534] In a further preferred embodiment the methylation incidence is determined over a part of the HAPLN3 gene comprising at least basepair no. 4896 to basepair no. 5402 of SEQ ID NO:4, or a sequence which is at least 90% identical to basepair no 4896 to basepair no. 5402 of SEQ ID NO:4. In a particular embodiment the methylation incidence is determined in at least a part of a region of the HAPLN3 gene comprising basepair no. 4896 to basepair no. 5402 of SEQ ID NO:4, or a sequence which is at least 90% identical to basepair no 4896 to basepair no. 5402 of SEQ ID NO:4.

[0535] In another preferred embodiment the methylation incidence is determined over a part of the ST6GALNAC3 gene comprising at least basepair no. 5097 to basepair no. 5186 of SEQ ID NO:5, or a sequence which is at least 90% identical to basepair no. 5097 to basepair no. 5186 of SEQ ID NO:5. In a particular embodiment the methylation incidence is determined in at least a part of a region of the ST6GALNAC3 gene comprising basepair no. 5097 to basepair no. 5186 of SEQ ID NO:5, or a sequence which is at least 90% identical to basepair no. 5097 to basepair no. 5186 of SEQ ID NO:5.

[0536] In yet another preferred embodiment the methylation incidence is determined over a part of the ZNF660 gene comprising at least basepair no. 4923 to basepair no. 5225 of SEQ ID NO:6, or a sequence which is at least 90% identical to basepair no. 4923 to basepair no. 5225 of SEQ ID NO:6. In a particular embodiment the methylation incidence is determined in at least a part of a region of the ZNF660 gene comprising basepair no. 4923 to basepair no. 5225 of SEQ ID NO:6, or a sequence which is at least 90% identical to basepair no. 4923 to basepair no. 5225 of SEQ ID NO:6.

[0537] An increased methylation incidence of the AOX1, C1orf114, GAS6, HAPLN3, ST6GALNAC3 and/or ZNF660 gene is indicative of the presence of prostate cancer whereas a decreased methylation incidence of the AOX1, C1orf114, GAS6, HAPLN3, ST6GALNAC3 and/or ZNF660 gene is indicative of the absence of prostate cancer

[0538] A methylation incidence in a sample increased by at least 10% or for example at least 15%, 20%, 25%, 30%, 35%, 40%, 41%, 42%, 43%, 44%, 45%, 46%, 47%, 48%, 49%, 50%, 55%, 60%, 65%, 70%, 80%, 90%, 100% or even more, relative to previous measurements on the same individual, or to measurements on non-diseased tissue from the same individual, or relative to a standard level, is considered an increased methylation incidence according to the present invention.

[0539] A methylation incidence in a sample increased by at least 1.5-fold or for example at least 2-fold, 3-fold, 5-fold, 10-fold or even more, relative to previous measurements on the same individual, or to measurements on non-diseased tissue from the same individual, or relative to a standard level, is considered an increased methylation degree according to the present invention.

[0540] In one embodiment the methylation incidence of a
[0541] gene selected from the group consisting of AOX1 (SEQ ID NO:1), C1 orf114 (SEQ ID NO:2), GAS6 (SEQ ID NO:3), HAPLN3 (SEQ ID NO:4), ST6GALNAC3 (SEQ ID NO:5) and ZNF660 (SEQ ID NO:6) and/or
[0542] nucleotide sequence having at least 90% sequence identity with a nucleotide sequence selected from the group consisting of SEQ ID NO:1, SEQ ID NO:2, SEQ ID NO:3, SEQ ID NO:4, SEQ ID NO:5 and SEQ ID NO:6 or part thereof
   in a sample is considered to be increased and indicative of the presence of prostate cancer when said methylation incidence is determined to be above 0.0001%, such as for example 0.001%, such as 0.01%, such as for example 0.1%, such as 1%, such as for example 5%, such as 10%, such as for example 15%, such as 20%, such as for example 35%, such as 40%, such as for example 45%, such as 50%.

[0543] In one preferred embodiment the methylation incidence of a
[0544] gene selected from the group consisting of AOX1 (SEQ ID NO:1), C1orf114 (SEQ ID NO:2), GAS6 (SEQ ID NO:3), HAPLN3 (SEQ ID NO:4), ST6GALNAC3 (SEQ ID NO:5) and ZNF660 (SEQ ID NO:6) and/or
[0545] nucleotide sequence having at least 90% sequence identity with a nucleotide sequence selected from the group consisting of SEQ ID NO:1, SEQ ID NO:2, SEQ ID NO:3, SEQ ID NO:4, SEQ ID NO:5 and SEQ ID NO:6 or part thereof
   in a sample is considered to be increased and indicative of the presence of prostate cancer when said methylation incidence is determined to be above 0.1%.

[0546] In another preferred embodiment the methylation incidence of a
[0547] gene selected from the group consisting of AOX1 (SEQ ID NO:1), C1orf114 (SEQ ID NO:2), GAS6 (SEQ ID NO:3), HAPLN3 (SEQ ID NO:4), ST6GALNAC3 (SEQ ID NO:5) and ZNF660 (SEQ ID NO:6) and/or
[0548] nucleotide sequence having at least 90% sequence identity with a nucleotide sequence selected from the group consisting of SEQ ID NO:1, SEQ ID NO:2, SEQ ID NO:3, SEQ ID NO:4, SEQ ID NO:5 and SEQ ID NO:6 or part thereof
   in a sample is considered to be increased and indicative of the presence of prostate cancer when said methylation incidence is determined to be above 0.01%.

[0549] In yet another preferred embodiment the methylation incidence of a
[0550] gene selected from the group consisting of AOX1 (SEQ ID NO:1), C1orf114 (SEQ ID NO:2), GAS6 (SEQ ID NO:3), HAPLN3 (SEQ ID NO:4), ST6GALNAC3 (SEQ ID NO:5) and ZNF660 (SEQ ID NO:6) and/or
[0551] nucleotide sequence having at least 90% sequence identity with a nucleotide sequence selected from the group consisting of SEQ ID NO:1, SEQ ID NO:2, SEQ ID NO:3, SEQ ID NO:4, SEQ ID NO:5 and SEQ ID NO:6 or part thereof
   in a sample is considered to be increased and indicative of the presence of prostate cancer when said methylation incidence is determined to be above 0.001%.

[0552] In yet another preferred embodiment the methylation incidence of a
[0553] gene selected from the group consisting of AOX1 (SEQ ID NO:1), C1orf114 (SEQ ID NO:2), GAS6 (SEQ ID NO:3), HAPLN3 (SEQ ID NO:4), ST6GALNAC3 (SEQ ID NO:5) and ZNF660 (SEQ ID NO:6) and/or
[0554] nucleotide sequence having at least 90% sequence identity with a nucleotide sequence selected from the group consisting of SEQ ID NO:1, SEQ ID NO:2, SEQ ID NO:3, SEQ ID NO:4, SEQ ID NO:5 and SEQ ID NO:6 or part thereof
   in a urine sample is considered to be increased and indicative of the presence of prostate cancer when said methylation incidence is determined to be above 0.1%. In particular, a methylation incidence above 0.1% in a urine sample may indicate the presence of a T2 stage prostate cancer.

[0555] Determining the methylation incidence of one or more of the genes described herein in histopathologically negative biopsies may improve the early detection of prostate cancer. A histopathologically negative biopsy is a biopsy or tissue sample, wherein it has been determined by microscopic examination of the tissue that the sample is negative, i.e. the individual from which the sample is taken does not have prostate cancer. The biopsy sample can be a biopsy of the prostate gland or resected prostate tissue.

[0556] Thus, in a specific embodiment an increased methylation incidence in histopathological cancer-negative biopsies is indicative of cancer-positive repeat biopsies. An increased methylation incidence is as defined above.

[0557] In one preferred embodiment of the present invention a methylation incidence of a
[0558] gene selected from the group consisting of AOX1 (SEQ ID NO:1), C1orf114 (SEQ ID NO:2), GAS6 (SEQ ID NO:3), HAPLN3 (SEQ ID NO:4), ST6GALNAC3 (SEQ ID NO:5) and ZNF660 (SEQ ID NO:6) and/or
[0559] nucleotide sequence having at least 90% sequence identity with a nucleotide sequence selected from the group consisting of SEQ ID NO:1, SEQ ID NO:2, SEQ ID NO:3, SEQ ID NO:4, SEQ ID NO:5 and SEQ ID NO:6 or part thereof
   in a sample is considered to be decreased and indicative of the absence of prostate cancer when said methylation incidence is determined to be below 0.001%.

[0560] Determining the methylation degree and/or methylation incidence in the methods according to the invention may be done using any suitable method known to the skilled person.

[0561] A number of current methodologies for methylation studies are well known to the skilled person. Sequencing of bisulphite-treated DNA is a normal method for methylation studies as it reveals directly the status of each CpG dinucleotide. Thus, in a preferred embodiment of the invention the methylation degree may be determined by sequencing of bisulphite-treated DNA. Bisulphate-based methylation genomic sequencing is capable of detecting every methylated cytosine on both strands of any target sequence, using DNA isolated from fewer than 100 cells, though of course more cells may be employed. In this method, sodium bisulphite is used to convert cytosine residues to uracil residues in single-stranded DNA, under conditions whereby 5-methylcytosine remains non-reactive. The converted DNA is amplified with specific primers and sequenced. All the cytosine residues remaining in the sequence represent previously methylated cytosines in the genome. This method may utilize defined procedures that maximize the efficiency of denaturation, bisulphite conversion and amplification, to permit methylation mapping of single genes from small amounts of genomic DNA.

[0562] According to the present invention the methylation incidence may be determined using methylation specific PCR. Methylation specific PCR (MSP) is one of the most widely used assays for the sensitive detection of methylation. U.S. Pat. No. 5,786,146 discloses a method of methylation specific PCR (MSP) for identifying DNA methylation patterns in a CpG containing nucleic acid, which is useful for use with the present invention. The method uses agents to modify unmethylated cytosine in the nucleic acid. Prior to amplification, the DNA is treated with sodium bisulphite to convert all unmethylated cytosines to uracils. The bisulphite reaction effectively converts methylation information into sequence difference. CpG specific oligonucleotide primers are used to distinguish between modified methylated and unmethylated nucleic acid. The identification of the methylated nucleic acid is based on the presence or absence of amplification product resulting from the amplification and distinguishing modified methylated and non-methylated nucleic acids. The generated PCR product can for example be visualized on a gel.

[0563] An important parameter for the specificity of methylation-specific PCR is determined by primer design. Since modification of DNA by bisulfite destroys strand complementarity, either strand can serve as the template for subsequent PCR amplification and the methylation pattern of each strand can then be determined. It will be appreciated, though, that amplifying a single strand (e.g. sense strand) is preferable in practice.

[0564] Primers are preferably designed to amplify a region that is 80-250 bp in length, which incorporates a sufficient number of cytosines in the original strand to assure that unmodified DNA does not serve as a template for the primers. In addition, the number and position of cytosines within the CpG dinucleotide determines the specificity of the primers for methylated and unmethylated templates. Typically, 1-3 CpG sites are included in each primer and concentrated in the 3′ region of each primer. This provides optimal specificity and minimizes false positives due to mispriming. To facilitate simultaneous analysis of each of the primers of a given gene in the same thermocycler, the length of the primers is adjusted to give nearly equal melting/annealing temperatures.

[0565] Real-time fluorescent MSP (MethyLight) is based on real time PCR employing fluorescent probes in conjunction with MSP and allows for a homogeneous reaction which is of higher throughput. Thus methylation status according to the methods of the invention may also be determined using real-time fluorescent MSP. If the probe does not contain CpGs, the reaction is essentially a quantitative version of MSP. However, the fluorescent probe is typically designed to anneal to a site containing one or more CpGs, and this third oligonucleotide increases the specificity of the assay for completely methylated target strands. Because the detection of the amplification occurs in real time, there is no need for a secondary electrophoresis step. Since there is no post PCR manipulation of the sample, the risk of contamination is reduced. The MethyLight probe can be of any format including but not limited to a Taqman probe or a LightCycler hybridization probe pair and if multiple reporter dyes are used, several probes can be performed simultaneously. Real-time fluorescent MSP is one preferred method for determining the methylation incidence according to the present invention. Methods such as a PCR-based high-resolution melting analysis assay may, however, also be used to determine the methylation status. Methylation-sensitive high-resolution melting (MS-HRM) analysis is another PCR-based technology which can be used for determination of methylation status according to the invention and for highly specific and highly sensitive detection of methylated genes. This method takes advantage of the fact that methylated DNA and unmethylated DNA acquire different sequences after bisulphite treatment, which results in PCR products with markedly different melting profiles/temperature. PCR is used to amplify both methylated and unmethylated sequences in the same reaction, and this method can be optimised to detect methylation levels as low as 0.1%. MS-HRM also allows estimation of methylation levels by comparison of melting profiles for a test sample to the melting profiles of PCR products derived from standards with known ratios of methylated:unmethylated alleles. MS-HRM analysis protocols are simple and the method is characterized by high reproducibilty (Wojdacz T K, Dobrovic A, Hansen L L. 2008, Nat Protoc. 2008; 3(12):1903-8).

[0566] The methylation status can also be measured quantitatively by pyrosequencing of bisulfite converted DNA following PCR amplification. Pyrosequencing is a sequencing-by-synthesis method that relies on the sequential addition and incorporation of nucleotides in a primer-directed polymerase extension. Only one of the four nucleotides is present at any time in the reaction vessel, and only if the added nucleotide is complementary to the template DNA will it be incorporated by a DNA polymerase. This event is monitored in real time and hence can be used to quantitate the ratio between methylated and unmethylated CpG dinucleotides. The pyrosequencing technology makes use of the release of PPᵢ molecules during the iterative incorporation of unmodified nucleotides that are quantitatively converted into a bioluminometric signal (Tost, J. & Gut, I. G. DNA methylation analysis by pyrosequencing, Nature Protocols 2,-2265-2275 (2007)).

[0567] In a preferred embodiment the methylation status is determined by targeted resequencing of bisulfite converted DNA (or PCR amplicons hereof) using massively parallel sequencing technologies (next-generation sequencing). This would allow digital quantification of the ratio between methylated and unmethylated CpG dinucleotide(s). Next-generation sequencing platforms are characterized by the ability to process millions of sequence reads in parallel rather than 96 at a time, as typically seen for capillary-based sequencing. The workflow to produce next-generation sequence-ready libraries is straightforward; DNA fragments are prepared for sequencing by ligating specific adaptor oligos to both ends of each DNA fragment. Importantly, relatively little input DNA (a few micrograms at most) is needed to produce a library. Currently available platforms for next-generation sequencing produce shorter read lengths (35-250 bp, depending on the platform), but longer reads will also be possible. (Mardis, E. R. The impact of next-generation sequencing technology on genetics, Trends Genet. 2008 March; 24(3):133-41).

[0568] In one embodiment the methylation status is determined using microarrays wherein a specific DNA probe for each CpG site to be studied is used. Thus, a specific DNA probe is used to determine whether a specific CpG site is methylated.

[0569] For rapid assessment of CpG methylation density of a DNA region the quantitative methylation density assay may be used as previously described by Galm et al. (2002) Genome Res. 12, 153-7. After bisulfite modification of genomic DNA, the region of interest is PCR amplified with nested primers. PCR products are purified and DNA amount is determined. A predetermined amount of DNA is incubated with .sup.3H-SAM (TRK581 Bioscience, Amersham) and Sssl methyltransferase for methylation quantification. Once reactions are terminated products are purified from the in-vitro methylation mixture. 20% of the eluant volume is counted in .sup.3H counter. Normalizing radioactivity DNA of each sample is measured again and the count is normalized to the DNA amount.

[0570] Restriction analysis of bisulphite modified DNA is a yet another quantitative technique which can be used to determine DNA methylation levels at specific gene loci in small amounts of genomic DNA. Restriction enzyme digestion is used to reveal methylation-dependent sequence differences in PCR products of sodium bisulfite-treated DNA. Methylation levels in original DNA sample are represented by the relative amounts of digested and undigested PCR product in a linearly quantitative fashion across a wide spectrum of DNA methylation levels. This technique can be reliably applied to DNA obtained from microdissected paraffin-embedded tissue samples.

[0571] In another embodiment, differential methylation hybridization (DMH) may be used to determine the methylation status. DMH integrates a high-density, microarray-based screening strategy to detect the presence or absence of methylated CpG dinucleotide genomic fragments. Array-based techniques are used when a number (e.g., >3) of methylation sites in a single region are to be analyzed. First, CpG dinucleotide nucleic acid fragments from a genomic library are generated, amplified and affixed on a solid support to create a CpG dinucleotide rich screening array. Amplicons are generated by digesting DNA from a sample with restriction endonucleases which digest the DNA into fragments but leaves the methylated CpG islands intact. These amplicons are used to probe the CpG dinucleotide rich fragments affixed on the screening array to identify methylation patterns in the CpG dinucleotide rich regions of the DNA sample. Unlike other methylation analysis methods such as Southern hybridization, bisulfite DNA sequencing and methylation-specific PCR which are restricted to analyzing one gene at a time, DMH utilizes numerous CpG dinucleotide rich genomic fragments which may be specifically designed to allow simultaneous analysis of multiple of methylation-associated genes in the genome (for further details see U.S. Pat. No. 6,605,432).

[0572] In yet another embodiment, immunoprecipitation of methylated sequences can be used to isolate sequence-specific methylated gene fragments. Briefly, genomic DNA is sonicated to yield fragments of 200-300 bp. The DNA is then denatured, precleaned with a protein A Fast FlowSepharose) and further incubated with a 5-methylcytidine monoclonal antibody. The complex may be purified using protein A Sepharose and subsequently washed. The immunoprecipitated samples are then analyzed using specific PCR primers.

### Determining Transcriptional Expression Level

[0573] The methods of the present invention comprises a step of determining the transcriptional expression level of at least one
[0574] gene selected from the group consisting of AOX1, C1orf114, GAS6, HAPLN3, ST6GALNAC3 and ZNF660, and/or
[0575] nucleotide sequence having at least 90% sequence identity with at least one nucleotide sequence selected from the group consisting of SEQ ID NO:1, SEQ ID NO:2, SEQ ID NO:3, SEQ ID NO:4, SEQ ID NO:5 and SEQ ID NO:6
   or part thereof in a sample.

[0576] Thus “the transcriptional expression level” as referred to herein is the transcriptional level of at least one
[0577] gene selected from the group consisting of AOX1 (SEQ ID NO:1), C1 orf114 (SEQ ID NO:2), GAS6 (SEQ ID NO:3), HAPLN3 (SEQ ID NO:4), ST6GALNAC3 (SEQ ID NO:5) and ZNF660 (SEQ ID NO:6), and/or
   nucleotide sequence having at least 90% sequence identity with a nucleotide sequence selected from the group consisting of SEQ ID NO:1, SEQ ID NO:2, SEQ ID NO:3, SEQ ID NO:4, SEQ ID NO:5 and SEQ ID NO:6.

[0578] When the transcriptional expression level of AOX1, C1orf114, GAS6, HAPLN3, ST6GALNAC3 and/or ZNF660 in the sample being tested is below the transcriptional expression level of the corresponding gene in a control sample or a standard value, the transcriptional level of the sample being tested is decreased. Thus, a decrease in the transcriptional expression level is measured relative to the transcriptional expression level of a control sample or a standard value. When for example the transcriptional expression level of the AOX gene in a control sample has a value of 100, and transcriptional expression level of the AOX1 gene in a test sample has a value of 25, the transcriptional expression level is said to be decreased by 75%.

[0579] The control sample may be an RNA sample from one healthy male without clinically diagnosed prostate cancer or a pool of RNA samples from more than one healthy male without clinically diagnosed prostate cancer. The control sample may also be an RNA sample from the same person being tested, wherein said control sample has been taken at an earlier time point in the course of disease or before diagnosing the disease. The control sample may also be derived from healthy tissue of the person being tested. The control sample is preferably taken from the same source, such as for example urine, tissue or blood, as the sample to be tested and the control sample is analysed along with the test sample.

[0580] In a particular preferred embodiment a decreased transcriptional expression level of at least one
[0581] gene selected from the group consisting of AOX1 (SEQ ID NO:1), C1orf114 (SEQ ID NO:2), GAS6 (SEQ ID NO:3), HAPLN3 (SEQ ID NO:4), ST6GALNAC3 (SEQ ID NO:5) and ZNF660 (SEQ ID NO:6), and/or
[0582] nucleotide sequence having at least 90% sequence identity with at least one nucleotide sequence selected from the group consisting of SEQ ID NO:1, SEQ ID NO:2, SEQ ID NO:3, SEQ ID NO:4, SEQ ID NO:5 and SEQ ID NO:6
   or part thereof in a sample is indicative of the presence of prostate cancer.

[0583] In one embodiment of the present invention a transcriptional level being decreased by at least 10%, or for example at least 15%, 20%, 25%, 30%, 35%, 40%, 45%, 50%, 55%, 60%, 65%, 70% or at least 75% and even more relative to previous measurements on the same individual, or to measurements on non-diseased tissue from the same individual, or relative to a standard level, is indicative of the presence of prostate cancer.

[0584] In another embodiment a transcriptional level being decreased by at least 2 fold or more, such as at least 3-fold, at least 4-fold, at least 5-fold or more relative to previous measurements on the same individual, or to measurements on non-diseased tissue from the same individual, or relative to a standard level, is indicative of prostate cancer.

[0585] In one preferred embodiment of the present invention a transcriptional level being decreased by at least 45%, or for example at least 46%, 47%, 48%, 49%, 50%, 51%, 52%, 53%, 54%, 55%, 56%, 57%, 58%, 59% or at least 60% and even more relative to previous measurements on the same individual, or to measurements on non-diseased tissue from the same individual, or relative to a standard level, is indicative of the presence of prostate cancer.

[0586] In a more preferred embodiment the transcriptional expression level of at least one:
[0587] gene selected from the group consisting of AOX1 (SEQ ID NO:1), C1orf114 (SEQ ID NO:2), GAS6 (SEQ ID NO:3), HAPLN3 (SEQ ID NO:4), ST6GALNAC3 (SEQ ID NO:5) and ZNF660 (SEQ ID NO:6), and/or
[0588] of a nucleotide sequence having at least 90% sequence identity with a nucleotide sequence selected from the group consisting of SEQ ID NO:1, SEQ ID NO:2, SEQ ID NO:3, SEQ ID NO:4, SEQ ID NO:5 and SEQ ID NO:6
   or part thereof in a sample is indicative of the presence of prostate cancer when said transcriptional expression level is decreased by at least 50%.

[0589] In a particular embodiment the transcriptional expression level of at least one:
[0590] i) gene selected from the group consisting of AOX1 (SEQ ID NO:1), C1 orf114 (SEQ ID NO:2), GAS6 (SEQ ID NO:3), HAPLN3 (SEQ ID NO:4), ST6GALNAC3 (SEQ ID NO:5) and ZNF660 (SEQ ID NO:6), and/or
[0591] ii) nucleotide sequence having at least 90% sequence identity with a nucleotide sequence selected from the group consisting of SEQ ID NO:1, SEQ ID NO:2, SEQ ID NO:3, SEQ ID NO:4, SEQ ID NO:5 and SEQ ID NO:6
   or part thereof in a sample is decreased 50% in comparison with the transcriptional level of a control sample.

[0592] Transcriptional expression levels of genes may in general be determined by detecting mRNA from the cells or sample of interest. Thus, in the present invention the transcriptional expression levels of the AOX1, C1orf114, GAS6, HAPLN3, ST6GALNAC3 and/or ZNF660 genes may be determined by detecting AOX1 mRNA (SEQ ID NO:7), C1 orf114 mRNA (SEQ ID NO:8), GAS6 mRNA (SEQ ID NO:9), HAPLN3 mRNA (SEQ ID NO:10), ST6GALNAC3 mRNA (SEQ ID NO:11) and/or ZNF660 mRNA (SEQ ID NO:12) and/or an mRNA sequence having at least 90% sequence identity with a nucleotide sequence selected from the group consisting of SEQ ID NO:7, SEQ ID NO:8, SEQ ID NO:9, SEQ ID NO:10, SEQ ID NO:11 and SEQ ID NO:12. Transcriptional expression products, such as mRNA may be detected by any suitable technique known to the person skilled in the art.

### Determining Transcriptional Levels by PCR-Based Methods

[0593] Polymerase Chain Reaction (PCR) is a well-known and well established technique to determine transcriptional products and therefore also a method that in one embodiment is used to determine the transcriptional expression level of the AOX1, C1orf114, GAS6, HAPLN3, ST6GALNAC3 and/or ZNF660 genes, or part thereof according to the invention.

[0594] Reverse transcription polymerase chain reaction (RT-PCR) is a variant of polymerase chain reaction (PCR). In RT-PCR an RNA strand is first reverse transcribed into its DNA complement (complementary DNA, or cDNA) using the enzyme reverse transcriptase, and the resulting cDNA is amplified using traditional PCR.

[0595] In one preferred embodiment the transcriptional expression level is determined by RT-PCR.

[0596] Methods of “quantitative” amplification are well known to those of skill in the art. For example, quantitative PCR involves simultaneously co-amplifying a known quantity of a control sequence using the same primers. This provides an internal standard that may be used to calibrate the PCR reaction. The high density array may then include probes specific to the internal standard for quantification of the amplified nucleic acid.

[0597] Thus, in one embodiment, this invention provides for a method of optimizing a probe set for detection of a particular gene. Generally, this method involves providing a high density array containing a multiplicity of probes of one or more particular length(s) that are complementary to sub-sequences of the mRNA transcribed by the target gene. In one embodiment the high density array may contain every probe of a particular length that is complementary to a particular mRNA. The probes of the high density array are then hybridized with their target nucleic acid alone and then hybridized with a high complexity, high concentration nucleic acid sample that does not contain the targets complementary to the probes. Thus, for example, where the target nucleic acid is an RNA, the probes are first hybridized with their target nucleic acid alone and then hybridized with RNA made from a cDNA library where the sense of the hybridized RNA is opposite that of the target nucleic acid (to insure that the high complexity sample does not contain targets for the probes). Those probes that show a strong hybridization signal with their target and little or no cross-hybridization with the high complexity sample are preferred probes for use in the high density arrays of this invention.

[0598] In addition to PCR and IVT reactions, the methods of the present invention are also applicable to a number of other reaction types, e.g., reverse transcription, nick translation, and the like.

[0599] The nucleic acids in a sample will generally be labelled to facilitate detection in subsequent steps. Labelling may be carried out during the amplification, in vitro transcription or nick translation processes. In particular, amplification, in vitro transcription or nick translation may incorporate a label into the amplified or transcribed sequence, either through the use of labelled primers or the incorporation of labelled dNTPs into the amplified sequence.

[0600] Hybridization between the sample nucleic acid and the oligonucleotide probes upon the array is then detected, using, e.g., epifluorescence confocal microscopy. Typically, sample is mixed during hybridization to enhance hybridization of nucleic acids in the sample to nucleic acid probes on the array.

[0601] In some cases, hybridized oligonucleotides may be labelled following hybridization. For example, where biotin labeled dNTPs are used in, e.g. amplification or transcription, streptavidin linked reporter groups may be used to label hybridized complexes. Such operations can readily be integrated into the systems of the present invention. Alternatively, the nucleic acids in the sample may be labelled following amplification. Post amplification labelling typically involves the covalent attachment of a particular detectable group upon the amplified sequences. Suitable labels or detectable groups include a variety of fluorescent or radioactive labelling groups well known in the art. These labels may also be coupled to the sequences using methods that are well known in the art.

[0602] Methods for detection of AOX1, C1orf114, GAS6, HAPLN3, ST6GALNAC3 and/or ZNF660 transcript or part thereof depend upon the label selected. A fluorescent label is preferred because of its extreme sensitivity and simplicity. Standard labelling procedures are used to determine the positions where interactions between a sequence and a reagent take place. For example, if a target sequence is labelled and exposed to a matrix of different probes, only those locations where probes do interact with the target will exhibit any signal. Alternatively, other methods may be used to scan the matrix to determine where interaction takes place. Of course, the spectrum of interactions may be determined in a temporal manner by repeated scans of interactions which occur at each of a multiplicity of conditions. However, instead of testing each individual interaction separately, a multiplicity of sequence interactions may be simultaneously determined on a matrix.

[0603] Means of detecting labelled nucleic acids hybridized to the probes of the high density array are known to those of skill in the art. Thus, for example, where a colorimetric label is used, simple visualization of the label is sufficient. Where a radioactive labelled probe is used, detection of the radiation (e.g with photographic film or a solid state detector) is sufficient.

[0604] In a preferred embodiment, however, the target nucleic acids are labelled with a fluorescent label and the localization of the label on the probe array is accomplished with fluorescent microscopy. The hybridized array is excited with a light source at the excitation wavelength of the particular fluorescent label and the resulting fluorescence at the emission wavelength is detected. In a preferred embodiment, the excitation light source is a laser appropriate for the excitation of the fluorescent label.

[0605] The target polynucleotide may be labelled by any of a number of convenient detectable markers. A fluorescent label is preferred because it provides a very strong signal with low background. It is also optically detectable at high resolution and sensitivity through a quick scanning procedure. Other potential labelling moieties include, radioisotopes, chemiluminescent compounds, labelled binding proteins, heavy metal atoms, spectroscopic markers, magnetic labels, and linked enzymes.

[0606] Another method for labelling may bypass any label of the target sequence. The target may be exposed to the probes, and a double strand hybrid is formed at those positions only. Addition of a double strand specific reagent will detect where hybridization takes place. An intercalative dye such as ethidium bromide may be used as long as the probes themselves do not fold back on themselves to a significant extent forming hairpin loops. However, the length of the hairpin loops in short oligonucleotide probes would typically be insufficient to form a stable duplex.

[0607] Suitable chromogens will include molecules and compounds which absorb light in a distinctive range of wavelengths so that a color may be observed, or emit light when irradiated with radiation of a particular wave length or wave length range, e.g., fluorescers. Biliproteins, e.g., phycoerythrin, may also serve as labels.

[0608] In addition, amplified sequences may be subjected to other post amplification treatments. For example, in some cases, it may be desirable to fragment the sequence prior to hybridization with an oligonucleotide array, in order to provide segments which are more readily accessible to the probes, which avoid looping and/or hybridization to multiple probes. Fragmentation of the nucleic acids may generally be carried out by physical, chemical or enzymatic methods that are known in the art.

[0609] Following the various sample preparation operations, the sample will generally be subjected to one or more analysis operations. Particularly preferred analysis operations include, e.g. sequence based analyses using an oligonucleotide array and/or size based analyses using, e.g. microcapillary array electrophoresis.

[0610] Microcapillary array electrophoresis generally involves the use of a thin capillary or channel which may or may not be filled with a particular separation medium. Electrophoresis of a sample through the capillary provides a size based separation profile for the sample. Microcapillary array electrophoresis generally provides a rapid method for size based sequencing, PCR product analysis and restriction fragment sizing. The high surface to volume ratio of these capillaries allows for the application of higher electric fields across the capillary without substantial thermal variation across the capillary, consequently allowing for more rapid separations. Furthermore, when combined with confocal imaging methods these methods provide sensitivity in the range of attomoles, which is comparable to the sensitivity of radioactive sequencing methods.

[0611] In some embodiments it may be desirable to provide additional or alternative means for analyzing the nucleic acids from the sample.

[0612] Transcriptional expression levels of genes may in general be determined by detecting mRNA from the cells or sample of interest. Thus, in the present invention the transcriptional expression levels of the AOX1, C1orf114, GAS6, HAPLN3, ST6GALNAC3 and/or ZNF660 genes may be determined by detecting AOX1 mRNA (SEQ ID NO:7), C1orf114 mRNA (SEQ ID NO:8), GAS6 mRNA (SEQ ID NO:9), HAPLN3 mRNA (SEQ ID NO:10), ST6GALNAC3 mRNA (SEQ ID NO:11) and/or ZNF660 mRNA (SEQ ID NO:12) and/or an mRNA sequence having at least 90% sequence identity with a nucleotide sequence selected from the group consisting of SEQ ID NO:7, SEQ ID NO:8, SEQ ID NO:9, SEQ ID NO:10, SEQ ID NO:11 and SEQ ID NO:12. Transcriptional expression products, such as mRNA may be detected by any suitable technique known to the person skilled in the art.

### Determining the Translational Expression Level

[0613] The methods of the present invention comprises a step of determining the translational expression level of at least one
[0614] iii) gene selected from the group consisting of AOX1 (SEQ ID NO:1), C1orf114 (SEQ ID NO:2), GAS6 (SEQ ID NO:3), HAPLN3 (SEQ ID NO:4), ST6GALNAC3 (SEQ ID NO:5) and ZNF660 (SEQ ID NO:6), and/or
[0615] iv) nucleotide sequence having at least 90% sequence identity with at least one nucleotide sequence selected from the group consisting of SEQ ID NO:1, SEQ ID NO:2, SEQ ID NO:3, SEQ ID NO:4, SEQ ID NO:5 and SEQ ID NO:6
   or part thereof in a sample.

[0616] Thus “the translational expression level” as referred to herein is the translational level of at least one
[0617] gene selected from the group consisting of AOX1 (SEQ ID NO:1), C1orf114 (SEQ ID NO:2), GAS6 (SEQ ID NO:3), HAPLN3 (SEQ ID NO:4), ST6GALNAC3 (SEQ ID NO:5) and ZNF660 (SEQ ID NO:6), and/or
[0618] nucleotide sequence having at least 90% sequence identity with a nucleotide sequence selected from the group consisting of SEQ ID NO:1, SEQ ID NO:2, SEQ ID NO:3, SEQ ID NO:4, SEQ ID NO:5 and SEQ ID NO:6.

[0619] When the translational expression level in the sample being tested is below the translational expression level of the corresponding gene in a control sample or a standard value, the translational level of the sample being tested is decreased. Thus, a decrease in the translational expression level is measured relative to the translational expression level of a control sample or a standard value. When for example the translational expression level of the AOX1 gene in a control sample has a value of 100, and the translational expression level of the AOX1 gene in a test sample has a value of 50, the translational expression level is said to be decreased by 50%.

[0620] The control sample may be an equivalent protein sample from one healthy male without clinically diagnosed prostate cancer or a pool of protein samples from more than one healthy male without clinically diagnosed prostate cancer. The control sample may also be a protein sample from the same person being tested, wherein said control sample has been taken at an earlier time point in the course of disease or before diagnosing the disease. The control sample is taken from the same source, such as for example urine, tissue or blood, as the sample to be tested and the control sample is analysed along with the test sample.

[0621] In a particular preferred embodiment a decreased translational expression level of at least one:
[0622] gene selected from the group consisting of AOX1, C1orf114, GAS6, HAPLN3, ST6GALNAC3 and ZNF660, and/or
[0623] nucleotide sequence having at least 90% sequence identity with at least one nucleotide sequence selected from the group consisting of SEQ ID NO:7, SEQ ID NO:8, SEQ ID NO:9, SEQ ID NO:10, SEQ ID NO:11 and SEQ ID NO:12
   or part thereof in a sample is indicative of the presence of prostate cancer.

[0624] In one embodiment of the present invention a translational expression level being decreased by at least 10%, or for example at least 15%, 20%, 25%, 30%, 35%, 40%, 41%, 42%, 43%, 44%, 45%, 46%, 47%, 48%, 49%, or at least 50% or even more relative to previous measurements on the same individual, or to measurements on non-diseased tissue from the same individual, or relative to a standard level, is indicative of the presence of prostate cancer.

[0625] In another embodiment a translational level decreased by at least 2 fold or more, such as at least 3-fold, at least 4-fold, at least 5-fold or more relative to previous measurements on the same individual, or to measurements on non-diseased tissue from the same individual, or relative to a standard level, is indicative of prostate cancer.

[0626] In a more preferred embodiment the translational expression level of at least one:
[0627] gene selected from the group consisting of AOX1 (SEQ ID NO:1), C1orf114 (SEQ ID NO:2), GAS6 (SEQ ID NO:3), HAPLN3 (SEQ ID NO:4), ST6GALNAC3 (SEQ ID NO:5) and ZNF660 (SEQ ID NO:6), and/or
[0628] of a nucleotide sequence having at least 90% sequence identity with a nucleotide sequence selected from the group consisting of SEQ ID NO:1, SEQ ID NO:2, SEQ ID NO:3, SEQ ID NO:4, SEQ ID NO:5 and SEQ ID NO:6
   or part thereof in a sample is indicative of the presence of prostate cancer when said transcriptional expression level is decreased by at least 50%.

[0629] In a particular embodiment the translational expression level of at least one:
[0630] gene selected from the group consisting of AOX1 (SEQ ID NO:1), C1orf114 (SEQ ID NO:2), GAS6 (SEQ ID NO:3), HAPLN3 (SEQ ID NO:4), ST6GALNAC3 (SEQ ID NO:5) and ZNF660 (SEQ ID NO:6), and/or
[0631] nucleotide sequence having at least 90% sequence identity with a nucleotide sequence selected from the group consisting of SEQ ID NO:1, SEQ ID NO:2, SEQ ID NO:3, SEQ ID NO:4, SEQ ID NO:5 and SEQ ID NO:6
   or part thereof in a sample is decreased 50% in comparison with the transcriptional level of a control sample.

### Methods for Determining Translational Expression Levels

[0632] The translational expression products such as peptides and proteins may be detected by any suitable technique or method known to the person skilled in the art.

[0633] The translational expression levels may preferably be detected by means of specific antibodies directed to the protein, such as immunofluorescent and/or immunohistochemical staining of the tissue.

[0634] Thus, in a preferred embodiment the translational expression level is determined by immunohistochemical analysis.

[0635] Immunohistochemical localization of expressed protein may be carried out by immunostaining of tissue sections from for example tissue samples such as a biopsy.

[0636] In yet another embodiment the translational expression level is determined by means of conventional enzyme assays, such as ELISA methods.

[0637] Furthermore, the translational expression level may be determined by means of peptide/protein chips capable of specifically binding the peptides and/or proteins assessed. Thereby an expression pattern may be obtained.

[0638] Translational expression levels of genes may in general be determined by detecting protein from the cells or sample of interest. Thus, in the present invention the transcriptional expression levels of the AOX1, C1orf114, GAS6, HAPLN3, ST6GALNAC3 and/or ZNF660 genes may be determined by detecting AOX1 protein (SEQ ID NO:13), C1orf114 protein (SEQ ID NO:14), GAS6 protein (SEQ ID NO:15), HAPLN3 protein (SEQ ID NO:16), ST6GALNAC3 protein (SEQ ID NO:17) and/or ZNF660 protein (SEQ ID NO:18) and/or an amino acid sequence having at least 90% sequence identity with an amino acid sequence selected from the group consisting of SEQ ID NO:13, SEQ ID NO:14, SEQ ID NO:15, SEQ ID NO:16, SEQ ID NO:17 and SEQ ID NO:18 or part thereof.

[0639] The translational expression products as described herein may be detected as indications of prostate cancer of the sample tested, such as diagnosing, predicting, prognosing, monitoring prostate cancer in an individual. The translational expression products of the genes may be detected in either a tissue sample as such, or in a body fluid sample, such as blood, serum, plasma, semen and/or urine of the individual. Preferably, the translational level is measured in a tissue sample, for example a biopsy, prostate tumour tissue, or a tissue of a resected prostate.

[0640] When in a tissue section following prostatectomy, if staining for the presence of protein is observed this is considered as an indication that the prediction of disease progression is favourable, for example that the recurrence risk is less severe. In contrast, if no staining can be identified in such a tissue section the prediction of disease progression is unfavourable.

### Methods

[0641] Method for Assisting in Diagnosing and/or for Diagnosing Prostate Cancer in an Individual

[0642] One aspect of the present invention relates to a method for assisting in diagnosing and/or for diagnosing prostate cancer in an individual said method comprising
[0643] determining the methylation degree and/or the methylation incidence of at least one gene selected from the group consisting of AOX1 (SEQ ID NO:1), C1orf114 (SEQ ID NO:2), GAS6 (SEQ ID NO:3), HAPLN3 (SEQ ID NO:4), ST6GALNAC3 (SEQ ID NO:5) and ZNF660 (SEQ ID NO:6) or determining the methylation degree and/or the methylation incidence of at least one nucleotide sequence having at least 90% sequence identity with a nucleotide sequence selected from the group consisting of SEQ ID NO:1, SEQ ID NO:2, SEQ ID NO:3, SEQ ID NO:4, SEQ ID NO:5 and SEQ ID NO:6 or part thereof in a sample from said individual, and/or
[0644] determining the transcriptional expression level of at least one gene selected from the group consisting of AOX1 (SEQ ID NO:1), C1orf114 (SEQ ID NO:2), GAS6 (SEQ ID NO:3), HAPLN3 (SEQ ID NO:4), ST6GALNAC3 (SEQ ID NO:5) and ZNF660 (SEQ ID NO:6), or nucleotide sequence having at least 90% sequence identity with at least one nucleotide sequence selected from the group consisting of SEQ ID NO:1, SEQ ID NO:2, SEQ ID NO:3, SEQ ID NO:4, SEQ ID NO:5 and SEQ ID NO:6 or part thereof in said sample, and/or
[0645] determining the translational expression level of at least one gene selected from the group consisting of AOX1 (SEQ ID NO:1), C1orf114 (SEQ ID NO:2), GAS6 (SEQ ID NO:3), HAPLN3 (SEQ ID NO:4), ST6GALNAC3 (SEQ ID NO:5) and ZNF660 (SEQ ID NO:6), or nucleotide sequence having at least 90% sequence identity with at least one nucleotide sequence selected from the group consisting of SEQ ID NO:1, SEQ ID NO:2, SEQ ID NO:3, SEQ ID NO:4, SEQ ID NO:5 and SEQ ID NO:6 or part thereof in said sample,
   wherein the methylation degree and/or the methylation incidence of i) and/or the transcriptional level of ii) and/or the translational expression level of iii) is indicative of presence or absence of prostate cancer.

[0646] In another aspect the invention concerns a method of determining if an individual has, or is at risk of developing prostate cancer, the method comprising the steps of:
[0647] a) providing a sample obtained from said individual;
[0648] b) determining in the sample of a),
   [0649] the methylation level, and/or
   [0650] the transcriptional expression level, and/or
   [0651] the translational expression level,
[0652] of one or more nucleotide sequences selected from the group consisting of:
[0653] I′) the nucleotide sequence of SEQ ID NO:5 (ST6GALNAC3); or
[0654] I″) a nucleotide sequence being complementary to SEQ ID NO: 5; or
[0655] I″′) a nucleotide sequence having at least 90% sequence identity to any one of I′ or I″; or
[0656] I″″) a fragment of any one of I′, I″ or I″′, wherein the fragment comprises at least 15 consecutive nucleotides of any one of I′, I″ or I″′; and
[0657] II′) the nucleotide sequence of SEQ ID NO:6 (ZNF660); or
[0658] II″) a nucleotide sequence being complementary to SEQ ID NO: 6; or
[0659] II″′) a nucleotide sequence having at least 90% sequence identity to any one of II′ or II″; or
[0660] II″″) a fragment of any one of II′, II″ or II″′, wherein the fragment comprises at least 15 consecutive nucleotides of any one of II′, II″ or II″′;
[0661] c) comparing the methylation level, transcriptional level, and/or translational expression level of the sampled nucleotide sequence of b), with the corresponding methylation level, transcriptional level, and/or translational expression level of a corresponding nucleotide sequence of a control sample, wherein a methylation level being significantly higher than the methylation level of the control sample, and/or a transcriptional and/or a translational expression level being significantly lower than the transcriptional level of the control sample, is indicative of that the individual has, or is at risk of developing prostate cancer.

[0662] The methylation level, such as the methylation degree and methylation incidence and methods for measuring the methylation degree and methylation incidence are defined in the section “Determining the methylation degree and the methylation incidence”.

[0663] In one preferred embodiment of the present invention, an increased methylation degree and/or methylation incidence is indicative of the presence of prostate cancer. In another preferred embodiment a decreased methylation degree and/or methylation incidence is indicative of the absence of prostate cancer.

[0664] An increased methylation degree and a decreased methylation degree are defined in the section “Determining the methylation degree and the methylation incidence”. Similarly, an increased methylation incidence and a decreased methylation incidence are defined in the section “Determining the methylation degree and the methylation incidence”.

[0665] In one preferred embodiment, a decreased transcriptional expression level and/or translational expression level is indicative of the presence of prostate cancer. In another preferred embodiment an increased transcriptional expression level and/or translational expression level is indicative of the absence of prostate cancer.

[0666] The transcriptional/translational expression level and methods for measuring the transcriptional/translational expression level are described in the sections “determining the transcriptional expression level of the AOX1, C1orf114, GAS6, HAPLN3, ST6GALNAC3 and/or ZNF660 genes” and “determining the translational expression level of the AOX1, C1orf114, GAS6, HAPLN3, ST6GALNAC3 and/or ZNF660 genes”.

[0667] A decreased and increased transcriptional/translational expression level are as defined in the sections “Determining the transcriptional expression level” and “Determining the translational expression level”.

[0668] In one embodiment, the method for assisting in diagnosing and/or for diagnosing prostate cancer further comprises a step of initiating treatment of prostate cancer if the methylation degree and/or methylation incidence are increased.

Method for Assisting in Prognosing and/or for Prognosing the Disease Progression of Prostate Cancer

[0669] In another aspect the invention relates to a method for assisting in prognosing and/or for prognosing the disease progression of prostate cancer in an individual having developed prostate cancer comprising the steps of

i) determining the methylation degree and/or the methylation incidence of at least one gene selected from the group consisting of AOX1 (SEQ ID NO:1), C1 orf114 (SEQ ID NO:2), GAS6 (SEQ ID NO:3), HAPLN3 (SEQ ID NO:4), ST6GALNAC3 (SEQ ID NO:5) and ZNF660 (SEQ ID NO:6) or determining the methylation degree and/or the methylation incidence of at least one nucleotide sequence having at least 90% sequence identity with a nucleotide sequence selected from the group consisting of SEQ ID NO:1, SEQ ID NO:2, SEQ ID NO:3, SEQ ID NO:4, SEQ ID NO:5 and SEQ ID NO:6 or part thereof in a sample from said individual, and/or
ii) determining the transcriptional expression level of at least one gene selected from the group consisting of AOX1, C1orf114, GAS6, HAPLN3, ST6GALNAC3 and/or ZNF660, or nucleotide sequence having at least 90% sequence identity with at least one nucleotide sequence selected from the group consisting of SEQ ID NO:7, SEQ ID NO:8, SEQ ID NO:9, SEQ ID NO:10, SEQ ID NO:11 and SEQ ID NO:12 or part thereof in said sample and/or
iii) determining the translational expression level of at least one gene selected from the group consisting of AOX1, C1orf114, GAS6, HAPLN3, ST6GALNAC3 and/or ZNF660, or amino acid sequence having at least 90% sequence identity with at least one nucleotide sequence selected from the group consisting of SEQ ID NO:13, SEQ ID NO:14, SEQ ID NO:15, SEQ ID NO:16, SEQ ID NO:17 and SEQ ID NO:18 or part thereof in said sample
wherein the methylation degree and/or methylation incidence of i) and/or the transcriptional level of ii) and/or the translational expression level of iii) is indicative of the outcome of prostate cancer

[0670] In yet another aspect the invention concerns a method for prognosing disease progression of prostate cancer in a patient, said method comprising the steps of:
[0671] a) providing a sample obtained from cancerous tissue of an individual;
[0672] b) determining in the sample of a),
[0673] the methylation level, and/or
[0674] the transcriptional expression level, and/or
[0675] the translational expression level,
[0676] of one or more biomarkers, wherein the biomarkers are nucleotide sequences selected from the group consisting of:
[0677] I′) the nucleotide sequence of SEQ ID NO:2 (C1orf114); or
[0678] I″) a nucleotide sequence being complementary to SEQ ID NO: 2; or
[0679] I″′) a nucleotide sequence having at least 90% sequence identity to any one of I′ or I″; or
[0680] I″″) a fragment of any one of I′, I″ or I″′, wherein the fragment comprises at least 15 consecutive nucleotides of any one of I′, I″ or I″′; and
[0681] II′) the nucleotide sequence of SEQ ID NO:4 (HAPLN3); or
[0682] II″) a nucleotide sequence being complementary to SEQ ID NO: 4; or
[0683] II″′) a nucleotide sequence having at least 90% sequence identity to any one of II′ or II″; or
[0684] II″″) a fragment of any one of II′, II″ or II″′, wherein the fragment comprises at least 15 consecutive nucleotides of any one of I′, I″ or I″′; and
[0685] III′) the nucleotide sequence of SEQ ID NO:1 (AOX1); or
[0686] III″) a nucleotide sequence being complementary to SEQ ID NO: 1; or
[0687] III″′) a nucleotide sequence having at least 90% sequence identity to any one of III′ or III″′; or
[0688] III″″) a fragment of any one of III′, III″ or III″′, wherein the fragment comprises at least 15 consecutive nucleotides of any one of III′, III″ or III″′; and
[0689] IV′) the nucleotide sequence of SEQ ID NO:3 (GAS6); or
[0690] IV″) a nucleotide sequence being complementary to SEQ ID NO: 4; or
[0691] IV″′) a nucleotide sequence having at least 90% sequence identity to any one of IV′ or IV″; or
[0692] IV″″) a fragment of any one of IV′, IV″ or IV″′, wherein the fragment comprises at least 15 consecutive nucleotides of any one of IV′, IV″ or IV″′; and
[0693] V′) the nucleotide sequence of SEQ ID NO:5 (ST6GALNAC3); or
[0694] V″) a nucleotide sequence being complementary to SEQ ID NO: 5; or
[0695] V″′) a nucleotide sequence having at least 90% sequence identity to any one of V′ or V″; or
[0696] V″″) a fragment of any one of V′, V″ or V″′, wherein the fragment comprises at least 15 consecutive nucleotides of any one of V′, V″ or V″′; and
[0697] VI′) the nucleotide sequence of SEQ ID NO:6 (ZNF660); or
[0698] VI″) a nucleotide sequence being complementary to SEQ ID NO: 6; or
[0699] VI″′) a nucleotide sequence having at least 90% sequence identity to any one of VI′ or VI″; or
[0700] VI″″) a fragment of any one of VI′, VI″ or VI″′, wherein the fragment comprises at least 15 consecutive nucleotides of any one of VI′, VI″ or VI″′;
[0701] c) obtaining a biomarker score based on the methylation level, transcriptional level, and/or translational expression level of the sampled nucleotide sequence of b), wherein the biomarker score is indicative of the prognosis of the prostate cancer patient.

[0702] The sensitivity of the method of the present invention may in certain embodiments be enhanced by using a panel of biomarkers. Thus in one aspect the invention concerns a method for prognosing disease progression of prostate cancer in a patient, said method comprising the steps of:
[0703] a) providing a sample obtained from cancerous tissue of an individual;
[0704] b) determining in the sample of a),
[0705] the methylation level, and/or
[0706] the transcriptional expression level, and/or
[0707] the translational expression level,
[0708] of a panel comprising one or more nucleotide sequences, wherein the panel is selected from the group consisting of:
[0709] i) C1orf114 (SEQ ID NO:2) and HAPLN3 (SEQ ID NO:4);
[0710] ii) AOX (SEQ ID NO:1) and C1orf114 (SEQ ID NO:2);
[0711] iii) AOX (SEQ ID NO:1), C1orf114 (SEQ ID NO:2) and GAS6 (SEQ ID NO:3);
[0712] iv) C1orf114 (SEQ ID NO:2), GAS6 (SEQ ID NO:3) and HAPLN3 (SEQ ID NO:4);
[0713] v) C1orf114 (SEQ ID NO:2);
[0714] vi) AOX (SEQ ID NO:1), C1orf114 (SEQ ID NO:2) and HAPLN3 (SEQ ID NO:4);
[0715] vii) AOX (SEQ ID NO:1), C1orf114 (SEQ ID NO:2), GAS6 (SEQ ID NO:3) and HAPLN3 (SEQ ID NO:4);
[0716] viii) C1orf114 (SEQ ID NO:2) and GAS6 (SEQ ID NO:3);
[0717] ix) AOX (SEQ ID NO:1) and GAS6 (SEQ ID NO:3);
[0718] x) AOX (SEQ ID NO:1);
[0719] xi) HAPLN3 (SEQ ID NO:4);
[0720] xii) AOX (SEQ ID NO:1) and HAPLN3 (SEQ ID NO:4);
[0721] xiii) AOX (SEQ ID NO:1), GAS6 (SEQ ID NO:3) and HAPLN3 (SEQ ID NO:4);
[0722] xiv) GAS6 (SEQ ID NO:3) and HAPLN3 (SEQ ID NO:4);
[0723] xv) GAS6 (SEQ ID NO:3);
[0724] xvi) ST6GALNAC3 (SEQ ID NO:5);
[0725] xvii) ZNF660 (SEQ ID NO:6);
[0726] xviii) AOX (SEQ ID NO:1) and ST6GALNAC3 (SEQ ID NO:5);
[0727] xix) AOX (SEQ ID NO:1) and ZNF660 (SEQ ID NO:6);
[0728] xx) C1orf114 (SEQ ID NO:2) and ST6GALNAC3 (SEQ ID NO:5);
[0729] xxi) C1orf114 (SEQ ID NO:2) and ZNF660 (SEQ ID NO:6);
[0730] xxii) GAS6 (SEQ ID NO:3) and ST6GALNAC3 (SEQ ID NO:5);
[0731] xxiii) GAS6 (SEQ ID NO:3) and ZNF660 (SEQ ID NO:6);
[0732] xxiv) HAPLN3 (SEQ ID NO:4) and ST6GALNAC3 (SEQ ID NO:5);
[0733] xxv) HAPLN3 (SEQ ID NO:4) and ZNF660 (SEQ ID NO:6);
[0734] xxvi) ST6GALNAC3 (SEQ ID NO:5) and ZNF660 (SEQ ID NO:6);
[0735] xxvii) AOX (SEQ ID NO:1), C1orf114 (SEQ ID NO:2) and ST6GALNAC3 (SEQ ID NO:5);
[0736] xxviii) AOX (SEQ ID NO:1), C1orf114 (SEQ ID NO:2) and ZNF660 (SEQ ID NO:6);
[0737] xxix) AOX (SEQ ID NO:1), GAS6 (SEQ ID NO:3) and ST6GALNAC3 (SEQ ID NO:5);
[0738] xxx) AOX (SEQ ID NO:1), GAS6 (SEQ ID NO:3) and ZNF660 (SEQ ID NO:6);
[0739] xxxi) AOX (SEQ ID NO:1), HAPLN3 (SEQ ID NO:4) and ST6GALNAC3 (SEQ ID NO:5);
[0740] xxxii) AOX (SEQ ID NO:1), HAPLN3 (SEQ ID NO:4) and ZNF660 (SEQ ID NO:6);
[0741] xxxiii) AOX (SEQ ID NO:1), ST6GALNAC3 (SEQ ID NO:5) and ZNF660 (SEQ ID NO:6);
[0742] xxxiv) C1orf114 (SEQ ID NO:2), GAS6 (SEQ ID NO:3) and ST6GALNAC3 (SEQ ID NO:5);
[0743] xxxv) C1orf114 (SEQ ID NO:2), GAS6 (SEQ ID NO:3) and ZNF660 (SEQ ID NO:6);
[0744] xxxvi) C1orf114 (SEQ ID NO:2), HAPLN3 (SEQ ID NO:4) and ST6GALNAC3 (SEQ ID NO:5);
[0745] xxxvii) C1orf114 (SEQ ID NO:2), HAPLN3 (SEQ ID NO:4) and ZNF660 (SEQ ID NO:6);
[0746] xxxviii) C1orf114 (SEQ ID NO:2), ST6GALNAC3 (SEQ ID NO:5) and ZNF660 (SEQ ID NO:6);
[0747] xxxix) GAS6 (SEQ ID NO:3), HAPLN3 (SEQ ID NO:4) and ST6GALNAC3 (SEQ ID NO:5);
[0748] xl) GAS6 (SEQ ID NO:3), HAPLN3 (SEQ ID NO:4) and ZNF660 (SEQ ID NO:6);
[0749] xli) GAS6 (SEQ ID NO:3), ST6GALNAC3 (SEQ ID NO:5) and ZNF660 (SEQ ID NO:6);
[0750] xlii) HAPLN3 (SEQ ID NO:4), ST6GALNAC3 (SEQ ID NO:5) and ZNF660 (SEQ ID NO:6);
[0751] xliii) AOX (SEQ ID NO:1), C1orf114 (SEQ ID NO:2), GAS6 (SEQ ID NO:3) and ST6GALNAC3 (SEQ ID NO:5);
[0752] xliv) AOX (SEQ ID NO:1), C1orf114 (SEQ ID NO:2), GAS6 (SEQ ID NO:3) and ZNF660 (SEQ ID NO:6);
[0753] xlv) AOX (SEQ ID NO:1), C1orf114 (SEQ ID NO:2), HAPLN3 (SEQ ID NO:4) and ST6GALNAC3 (SEQ ID NO:5);
[0754] xlvi) AOX (SEQ ID NO:1), C1orf114 (SEQ ID NO:2), HAPLN3 (SEQ ID NO:4) and ZNF660 (SEQ ID NO:6);
[0755] xlvii) AOX (SEQ ID NO:1), C1orf114 (SEQ ID NO:2), ST6GALNAC3 (SEQ ID NO:5) and ZNF660 (SEQ ID NO:6);
[0756] xlviii) AOX (SEQ ID NO:1), GAS6 (SEQ ID NO:3), HAPLN3 (SEQ ID NO:4) and ST6GALNAC3 (SEQ ID NO:5);
[0757] xlix) AOX (SEQ ID NO:1), GAS6 (SEQ ID NO:3), HAPLN3 (SEQ ID NO:4) and ZNF660 (SEQ ID NO:6);
[0758] l) AOX (SEQ ID NO:1), GAS6 (SEQ ID NO:3), ST6GALNAC3 (SEQ ID NO:5) and ZNF660 (SEQ ID NO:6);
[0759] li) AOX (SEQ ID NO:1), HAPLN3 (SEQ ID NO:4), ST6GALNAC3 (SEQ ID NO:5) and ZNF660 (SEQ ID NO:6);
[0760] lii) C1orf114 (SEQ ID NO:2), GAS6 (SEQ ID NO:3), HAPLN3 (SEQ ID NO:4) and ST6GALNAC3 (SEQ ID NO:5);
[0761] liii) C1orf114 (SEQ ID NO:2), GAS6 (SEQ ID NO:3), HAPLN3 (SEQ ID NO:4) and ZNF660 (SEQ ID NO:6);
[0762] liv) C1orf114 (SEQ ID NO:2), GAS6 (SEQ ID NO:3), ST6GALNAC3 (SEQ ID NO:5) and ZNF660 (SEQ ID NO:6);
[0763] lv) C1orf114 (SEQ ID NO:2), HAPLN3 (SEQ ID NO:4), ST6GALNAC3 (SEQ ID NO:5) and ZNF660 (SEQ ID NO:6);
[0764] lvi) GAS6 (SEQ ID NO:3), HAPLN3 (SEQ ID NO:4), ST6GALNAC3 (SEQ ID NO:5) and ZNF660 (SEQ ID NO:6);
[0765] lvii) AOX (SEQ ID NO:1), C1orf114 (SEQ ID NO:2), GAS6 (SEQ ID NO:3), HAPLN3 (SEQ ID NO:4) and ST6GALNAC3 (SEQ ID NO:5);
[0766] lviii) AOX (SEQ ID NO:1), C1orf114 (SEQ ID NO:2), GAS6 (SEQ ID NO:3), HAPLN3 (SEQ ID NO:4) and ZNF660 (SEQ ID NO:6);
[0767] lix) AOX (SEQ ID NO:1), C1orf114 (SEQ ID NO:2), GAS6 (SEQ ID NO:3), ST6GALNAC3 (SEQ ID NO:5) and ZNF660 (SEQ ID NO:6);
[0768] lx) AOX (SEQ ID NO:1), C1orf114 (SEQ ID NO:2), HAPLN3 (SEQ ID NO:4), ST6GALNAC3 (SEQ ID NO:5) and ZNF660 (SEQ ID NO:6);
[0769] lxi) AOX (SEQ ID NO:1), GAS6 (SEQ ID NO:3), HAPLN3 (SEQ ID NO:4), ST6GALNAC3 (SEQ ID NO:5) and ZNF660 (SEQ ID NO:6);
[0770] lxii) C1orf114 (SEQ ID NO:2), GAS6 (SEQ ID NO:3), HAPLN3 (SEQ ID NO:4), ST6GALNAC3 (SEQ ID NO:5) and ZNF660 (SEQ ID NO:6);
[0771] lxiii) AOX (SEQ ID NO:1), C1orf114 (SEQ ID NO:2), GAS6 (SEQ ID NO:3), HAPLN3 (SEQ ID NO:4), ST6GALNAC3 (SEQ ID NO:5) and ZNF660 (SEQ ID NO:6);
[0772] wherein any one of said SEQ ID NO: 1, 2, 3, 4, 5 or 6 of said panels i) through lxiii) optionally is individually replaced by:
[0773] b′) a nucleotide sequence being complementary to any one of said SEQ ID NO:s 1, 2, 3, 4, 5 or 6 of said panels i) through lvii); or
[0774] b″) a nucleotide sequence having at least 90% sequence identity to any one of said SEQ ID NO:s 1, 2, 3, 4, 5 or 6 of said panels i) through lvii), or the complementary nucleotide sequences of b′); or
[0775] b″′) a fragment comprising at least 15 consecutive nucleotides of any one of said SEQ ID NO:s 1, 2, 3, 4, 5 or 6 of said panels i) through lvii), or the nucleotide sequences of b′), or the nucleotide sequences of b″); and
[0776] c) obtaining a biomarker score based on the methylation level, transcriptional level, and/or translational expression level of the sampled nucleotide sequence of b), wherein the biomarker score is indicative of the prognosis of the prostate cancer patient.

[0777] The biomarker score may be any suitable biomarker score known by those of skill in the art. The biomarker score may e.g. be based on the Gleason sum, prostate specific antigen (PSA) amount, MIC-I stromal staining and/or tumour-node-metastasis (TNM) stage.

[0778] The present invention provides methods suitable for use during different stages of disease progression of prostate cancer, from testing a non-diseased individual to determining life expectancy of a severely diseased individual afflicted with prostate cancer.

[0779] In one such aspect, the invention concerns a method of determining the risk of progression of a prostate cancer patient after therapy, comprising:
[0780] a) providing a sample obtained from said patient;
[0781] b) determining in the sample of a),
   [0782] the methylation level, and/or
   [0783] the transcriptional expression level, and/or
   [0784] the translational expression level,
   [0785] of one or more biomarkers, wherein the biomarkers are nucleotide sequences selected from the group consisting of:
   [0786] I′) the nucleotide sequence of SEQ ID NO:2 (C1orf114); or
   [0787] I″) a nucleotide sequence being complementary to SEQ ID NO: 2; or
   [0788] I″′) a nucleotide sequence having at least 90% sequence identity to any one of I′ or I″; or
   [0789] I″″) a fragment of any one of I′, I″ or I″′, wherein the fragment comprises at least 15 consecutive nucleotides of any one of I′, I″ or I″′; and
   [0790] II′) the nucleotide sequence of SEQ ID NO:4 (HAPLN3); or
   [0791] II″) a nucleotide sequence being complementary to SEQ ID NO: 4; or
   [0792] II″′) a nucleotide sequence having at least 90% sequence identity to any one of II′ or II″; or
   [0793] II″″) a fragment of any one of II′, II″ or II″′, wherein the fragment comprises at least 15 consecutive nucleotides of any one of I′, I″ or I″′; and
   [0794] III′) the nucleotide sequence of SEQ ID NO:1 (AOX1); or
   [0795] III″) a nucleotide sequence being complementary to SEQ ID NO: 1; or
   [0796] III″′) a nucleotide sequence having at least 90% sequence identity to any one of III′ or III″′; or
   [0797] III″″) a fragment of any one of III′, III″ or III″′, wherein the fragment comprises at least 15 consecutive nucleotides of any one of III′, III″ or III″′; and
   [0798] IV′) the nucleotide sequence of SEQ ID NO:3 (GAS6); or
   [0799] IV″) a nucleotide sequence being complementary to SEQ ID NO: 4; or
   [0800] IV″′) a nucleotide sequence having at least 90% sequence identity to any one of IV′ or IV″; or
   [0801] IV″″) a fragment of any one of IV′, IV″ or IV″′, wherein the fragment comprises at least 15 consecutive nucleotides of any one of IV′, IV″ or IV″′; and
   [0802] V′) the nucleotide sequence of SEQ ID NO:5 (ST6GALNAC3); or
   [0803] V″) a nucleotide sequence being complementary to SEQ ID NO: 5; or
   [0804] V″′) a nucleotide sequence having at least 90% sequence identity to any one of V′ or V″; or
   [0805] V″″) a fragment of any one of V′, V″ or V″′, wherein the fragment comprises at least 15 consecutive nucleotides of any one of V′, V″ or V″′; and
   [0806] VI′) the nucleotide sequence of SEQ ID NO:6 (ZNF660); or
   [0807] VI″) a nucleotide sequence being complementary to SEQ ID NO: 6; or
   [0808] VI″′) a nucleotide sequence having at least 90% sequence identity to any one of VI′ or VI″; or
   [0809] VI″″) a fragment of any one of VI′, VI″ or VI″′, wherein the fragment comprises at least 15 consecutive nucleotides of any one of VI′, VI″ or VI″′;
[0810] c) obtaining a biomarker score based on the methylation level, transcriptional level, and/or translational expression level of the sampled nucleotide sequence of b),
[0811] d) correlating the methylation level, transcriptional level, and/or translational expression level with the risk of progression.

[0812] In another aspect the invention concerns a method for assisting prognosis of disease progression of prostate cancer in an individual having developed prostate cancer, the method comprising the steps of:

a) determining the methylation level of at least one gene selected from the group consisting of C1orf114 (SEQ ID NO:2), HAPLN3 (SEQ ID NO:4), AOX1 (SEQ ID NO:1), GAS6 (SEQ ID NO:3), ST6GALNAC3 (SEQ ID NO:5) and ZNF660 (SEQ ID NO:6) or determining the methylation level of at least one nucleotide sequence having at least 90% sequence identity with a nucleotide sequence selected from the group consisting of SEQ ID NO:2, SEQ ID NO:4, SEQ ID NO:1, SEQ ID NO:3, SEQ ID NO:5, and SEQ ID NO:6 or part thereof in a sample from said individual, and/or
b) determining the transcriptional expression level of at least one gene selected from the group consisting of C1orf114 (SEQ ID NO:2), HAPLN3 (SEQ ID NO:4), AOX1 (SEQ ID NO:1), GAS6 (SEQ ID NO:3), ST6GALNAC3 (SEQ ID NO:5) and ZNF660 (SEQ ID NO:6), or nucleotide sequence having at least 90% sequence identity with at least one nucleotide sequence selected from the group consisting of SEQ ID NO:2, SEQ ID NO:4, SEQ ID NO:1, SEQ ID NO:3, SEQ ID NO:5, and SEQ ID NO:6 or part thereof in said sample and/or
c) determining the translational expression level of at least one gene selected from the group consisting of C1orf114 (SEQ ID NO:2), HAPLN3 (SEQ ID NO:4), AOX1 (SEQ ID NO:1), GAS6 (SEQ ID NO:3), ST6GALNAC3 (SEQ ID NO:5) and ZNF660 (SEQ ID NO:6), or nucleotide sequence having at least 90% sequence identity with at least one nucleotide sequence selected from the group consisting of SEQ ID NO:2, SEQ ID NO:4, SEQ ID NO:1, SEQ ID NO:3, SEQ ID NO:5, and SEQ ID NO:6 or part thereof in said sample
wherein the methylation level of i) and/or the transcriptional level of ii) and/or the translational expression level of iii) is indicative of the outcome of prostate cancer

[0813] In yet another aspect the invention concerns a method for assisting in predicting and/or for predicting the outcome of prostate cancer in an individual having developed prostate cancer comprising the steps of:

a) determining the methylation level of at least one gene selected from the group consisting of C1orf114 (SEQ ID NO:2), HAPLN3 (SEQ ID NO:4), AOX1 (SEQ ID NO:1), GAS6 (SEQ ID NO:3), ST6GALNAC3 (SEQ ID NO:5) and ZNF660 (SEQ ID NO:6) or determining the methylation level of at least one nucleotide sequence having at least 90% sequence identity with a nucleotide sequence selected from the group consisting of SEQ ID NO:2, SEQ ID NO:4, SEQ ID NO:1, SEQ ID NO:3, SEQ ID NO:5, and SEQ ID NO:6 or part thereof in a sample from said individual, and/or
b) determining the transcriptional expression level of at least one gene selected from the group consisting of C1orf114 (SEQ ID NO:2), HAPLN3 (SEQ ID NO:4), AOX1 (SEQ ID NO:1), GAS6 (SEQ ID NO:3), ST6GALNAC3 (SEQ ID NO:5) and ZNF660 (SEQ ID NO:6), or nucleotide sequence having at least 90% sequence identity with at least one nucleotide sequence selected from the group consisting of SEQ ID NO:2, SEQ ID NO:4, SEQ ID NO:1, SEQ ID NO:3, SEQ ID NO:5, and SEQ ID NO:6 or part thereof in said sample and/or
c) determining the translational expression level of at least one gene selected from the group consisting of C1orf114 (SEQ ID NO:2), HAPLN3 (SEQ ID NO:4), AOX1 (SEQ ID NO:1), GAS6 (SEQ ID NO:3), ST6GALNAC3 (SEQ ID NO:5) and ZNF660 (SEQ ID NO:6), or nucleotide sequence having at least 90% sequence identity with at least one nucleotide sequence selected from the group consisting of SEQ ID NO:2, SEQ ID NO:4, SEQ ID NO:1, SEQ ID NO:3, SEQ ID NO:5, and SEQ ID NO:6 or part thereof in said sample
wherein the methylation level of a) and/or the transcriptional level of b) and/or the translational expression level of c) is indicative of the outcome of prostate cancer.

[0814] It is important to monitor the effect of treatment of prostate cancer in order to apply the correct treatment regime to the individual suffering from prostate cancer. The monitoring may be a combination of methods wherein the method of the present invention is one. Thus in one aspect the invention concerns a method for assisting in monitoring and/or for monitoring the effect of treatment on prostate cancer progression in an individual having developed prostate cancer and being treated for said prostate cancer, comprising the steps of:

a) determining the methylation level of at least one gene selected from the group consisting of C1orf114 (SEQ ID NO:2), HAPLN3 (SEQ ID NO:4), AOX1 (SEQ ID NO:1), GAS6 (SEQ ID NO:3), ST6GALNAC3 (SEQ ID NO:5) and ZNF660 (SEQ ID NO:6) or determining the methylation level of at least one nucleotide sequence having at least 90% sequence identity with a nucleotide sequence selected from the group consisting of SEQ ID NO:2, SEQ ID NO:4, SEQ ID NO:1, SEQ ID NO:3, SEQ ID NO:5, and SEQ ID NO:6 or part thereof in a sample from said individual, and/or
b) determining the transcriptional expression level of at least one gene selected from the group consisting of C1orf114 (SEQ ID NO:2), HAPLN3 (SEQ ID NO:4), AOX1 (SEQ ID NO:1), GAS6 (SEQ ID NO:3), ST6GALNAC3 (SEQ ID NO:5) and ZNF660 (SEQ ID NO:6), or nucleotide sequence having at least 90% sequence identity with at least one nucleotide sequence selected from the group consisting of SEQ ID NO:2, SEQ ID NO:4, SEQ ID NO:1, SEQ ID NO:3, SEQ ID NO:5, and SEQ ID NO:6 or part thereof in said sample and/or
c) determining the translational expression level of at least one gene selected from the group consisting of C1orf114 (SEQ ID NO:2), HAPLN3 (SEQ ID NO:4), AOX1 (SEQ ID NO:1), GAS6 (SEQ ID NO:3), ST6GALNAC3 (SEQ ID NO:5) and ZNF660 (SEQ ID NO:6), or nucleotide sequence having at least 90% sequence identity with at least one nucleotide sequence selected from the group consisting of SEQ ID NO:2, SEQ ID NO:4, SEQ ID NO:1, SEQ ID NO:3, SEQ ID NO:5, and SEQ ID NO:6 or part thereof in said sample
wherein the methylation level of i) and/or the transcriptional level of ii) and/or the translational expression level of iii) is indicative of prostate cancer progression.

[0815] An increased methylation level is typically indicative of poor outcome, while a decreased transcriptional and/or translational expression level in the sample is indicative of poor outcome of the disease, e.g. decreased life expectancy.

[0816] An increased methylation level is typically indicative of high recurrence risk of prostate cancer, and a decreased transcriptional and/or translational expression level is also typically indicative of high recurrence risk of prostate cancer.

[0817] The recurrence risk may be determined at any suitable time as determined by the person of skill in the art. In one embodiment the recurrence risk is determined following radical prostatectomy.

[0818] An increased methylation level in a sample from an individual is indicative of a progression of prostate cancer, when compared to the methylation level in a sample taken from the same individual before treatment onset and/or at an earlier time point during treatment

[0819] Similarly, a decreased transcriptional and/or translational expression level in a sample from an individual is also indicative of a progression of prostate cancer when compared to the transcriptional and/or translational expression level in a sample taken from the same individual before treatment onset and/or at an earlier time point during treatment.

[0820] In a further aspect the present invention concerns a method for assisting in monitoring and/or for monitoring the progression of prostate cancer from a silent/indolent to an aggressive prostate cancer in an individual having developed prostate cancer comprising the steps of:

a) determining the methylation level of at least one gene selected from the group consisting of C1orf114 (SEQ ID NO:2), HAPLN3 (SEQ ID NO:4), AOX1 (SEQ ID NO:1), GAS6 (SEQ ID NO:3), ST6GALNAC3 (SEQ ID NO:5) and ZNF660 (SEQ ID NO:6) or determining the methylation level of at least one nucleotide sequence having at least 90% sequence identity with a nucleotide sequence selected from the group consisting of SEQ ID NO:2, SEQ ID NO:4, SEQ ID NO:1, SEQ ID NO:3, SEQ ID NO:5, and SEQ ID NO:6 or part thereof in a sample from said individual, and/or
b) determining the transcriptional expression level of at least one gene selected from the group consisting of C1orf114 (SEQ ID NO:2), HAPLN3 (SEQ ID NO:4), AOX1 (SEQ ID NO:1), GAS6 (SEQ ID NO:3), ST6GALNAC3 (SEQ ID NO:5) and ZNF660 (SEQ ID NO:6), or nucleotide sequence having at least 90% sequence identity with at least one nucleotide sequence selected from the group consisting of SEQ ID NO: 2, SEQ ID NO:4, SEQ ID NO:1, SEQ ID NO:3, SEQ ID NO:5, and SEQ ID NO:6 or part thereof in said sample and/or
c) determining the translational expression level of at least one gene selected from the group consisting of C1orf114 (SEQ ID NO:2), HAPLN3 (SEQ ID NO:4), AOX1 (SEQ ID NO:1), GAS6 (SEQ ID NO:3), ST6GALNAC3 (SEQ ID NO:5) and ZNF660 (SEQ ID NO:6), or nucleotide sequence having at least 90% sequence identity with at least one nucleotide sequence selected from the group consisting of SEQ ID NO:2, SEQ ID NO:4, SEQ ID NO:1, SEQ ID NO:3, SEQ ID NO:5, and SEQ ID NO:6 or part thereof in said sample
wherein increased methylation level of a) and/or decreased transcriptional level of b) and/or decreased translational expression level of c) is indicative of the progression of prostate cancer from a silent/indolent to an aggressive prostate cancer.

[0821] In one embodiment the silent/indolent prostate cancer is a slow-growing and slow-progressing organ-confined prostate cancer with no or only minor clinical symptoms. An aggressive prostate cancer is one which has progressed or will progress relatively fast (i.e. within the remaining life expectancy of a given patient) to non-organ-confined prostate cancer: Such an aggressive cancer is considered to be a treatment-requiring prostate cancer.

[0822] An increased methylation level is indicative of a progression of prostate cancer when compared to the methylation level measured at an earlier time point of the course of disease of said prostate cancer. Analogously, decreased transcriptional and/or translational expression levels are indicative of progression of the prostate cancer, when compared to transcriptional and/or translational expression level measured at an earlier time point of the course of disease of said prostate cancer.

[0823] The methods of the present invention may be used by the clinician or other person of skill in the art to assist in determining and/or determining the treatment regime of an individual having developed prostate cancer. In one such aspect the invention concerns a method comprising the steps of:

a) determining the methylation level of at least one gene selected from the group consisting of C1orf114 (SEQ ID NO:2), HAPLN3 (SEQ ID NO:4), AOX1 (SEQ ID NO:1), GAS6 (SEQ ID NO:3), ST6GALNAC3 (SEQ ID NO:5) and ZNF660 (SEQ ID NO:6) or determining the methylation level of at least one nucleotide sequence having at least 90% sequence identity with a nucleotide sequence selected from the group consisting of SEQ ID NO:2, SEQ ID NO:4, SEQ ID NO:1, SEQ ID NO:3, SEQ ID NO:5, and SEQ ID NO:6 or part thereof in a sample from said individual, and/or
b) determining the transcriptional expression level of at least one gene selected from the group consisting of C1orf114 (SEQ ID NO:2), HAPLN3 (SEQ ID NO:4), AOX1 (SEQ ID NO:1), GAS6 (SEQ ID NO:3), ST6GALNAC3 (SEQ ID NO:5) and ZNF660 (SEQ ID NO:6), or nucleotide sequence having at least 90% sequence identity with at least one nucleotide sequence selected from the group consisting of SEQ ID NO:2, SEQ ID NO:4, SEQ ID NO:1, SEQ ID NO:3, SEQ ID NO:5, and SEQ ID NO:6 or part thereof in said sample and/or
c) determining the translational expression level of at least one gene selected from the group consisting of C1orf114 (SEQ ID NO:2), HAPLN3 (SEQ ID NO:4), AOX1 (SEQ ID NO:1), GAS6 (SEQ ID NO:3), ST6GALNAC3 (SEQ ID NO:5) and ZNF660 (SEQ ID NO:6), or nucleotide sequence having at least 90% sequence identity with at least one nucleotide sequence selected from the group consisting of SEQ ID NO:2, SEQ ID NO:4, SEQ ID NO:1, SEQ ID NO:3, SEQ ID NO:5, and SEQ ID NO:6 or part thereof in said sample
wherein the methylation level of a) and/or the transcriptional level of b) and/or the translational expression level of c) is indicative of the treatment regime to be offered to the individual having developed prostate cancer.

[0824] In one embodiment the method comprises the steps of:

a) determining the methylation level of at least one gene selected from the group consisting of AOX1 (SEQ ID NO:1), C1orf114 (SEQ ID NO:2), GAS6 (SEQ ID NO:3), HAPLN3 (SEQ ID NO:4), ST6GALNAC3 (SEQ ID NO:5) and ZNF660 (SEQ ID NO:6) or nucleotide sequence having at least 90% sequence identity with a nucleotide sequence selected from the group consisting of SEQ ID NO:7, SEQ ID NO:8, SEQ ID NO:9, SEQ ID NO:10, SEQ ID NO:11 and SEQ ID NO:12, or part thereof in a control sample;
b) determining the methylation level of at least one gene selected from the group consisting of AOX1 (SEQ ID NO:1), C1orf114 (SEQ ID NO:2), GAS6 (SEQ ID NO:3), HAPLN3 (SEQ ID NO:4), ST6GALNAC3 (SEQ ID NO:5) and ZNF660 (SEQ ID NO:6) as identified in a) in a sample from said individual;
c) comparing the methylation level determined in a) and b), wherein if the methylation level determined in b) is higher than the methylation level determined in a) then the methylation level is increased and wherein if the methylation level determined in b) is lower than the methylation level determined in a) then the methylation level is decreased.

[0825] In one embodiment the individual from which the sample originates has a normal prostate specific antigen (PSA) level. In another embodiment the individual has a PSA level higher than a normal PSA level. A normal PSA level is a PSA level of at the most 3 ng per mL serum.

[0826] The term prognosing as used herein refers to predicting the probable outcome or course of disease independent of possible intervention or treatment for example in the form of surgery, medication etc. Prognosing may refer to the likelihood of recovery from disease after intervention or treatment. Prognosing may also refer to predicting the time to recurrence and/or predicting the time to cancer specific death. The time to cancer specific death may for example be predicted after conservative treatment or watchful waiting.

[0827] In conservative treatment or watchful waiting, treatment is delayed in favour of careful monitoring for the progression of prostate cancer. Watchful waiting may also be referred to as expectant management, conservative management, observation, or surveillance. The theory behind watchful waiting is that most prostate cancers, specifically prostate adenocarcinomas, usually grow very slowly. Patients who have low Gleason score, other medical complications, or low grade tumours may wish to postpone treatment due to the side effects.

[0828] However, it is very difficult to make a precise prediction of pathological stage based on microscopic examination of prostate needle biopsies as used for determination of the clinical T-stage. Therefore, the methylation level and/or the transcriptional expression level and/or the translational expression level of the genes may be used as a surrogate marker for prognosing disease progression of prostate cancer.

[0829] According to the method for assisting in prognosing and/or prognosing the disease progression, an increased methylation degree and/or methylation incidence is indicative of a poor outcome. Similarly, a decreased transcriptional and/or translational expression level in the sample is indicative of a poor outcome. A poor outcome may represent a decrease in the time to recurrence and/or a decrease in the time to cancer specific death for example after conservative treatment. A poor outcome may also represent an increased risk of death after conservative treatment or watchful waiting. Thus, a poor outcome can indicate that a specific treatment should be initialized.

[0830] In one embodiment a poor outcome may also represent an increased risk of PSA recurrence after radical prostatectomy. In one particular embodiment an increased methylation degree and/or incidence of C1orf114 (SEQ ID NO:2) indicates an increased risk of PSA recurrence after radical prostatectomy. This is exemplified in Table 8, right column, where multivariate analysis indicates that the methylation level of C1orf114 is a strong independent prognostic marker for prostate cancer. In another particular embodiment an increased methylation degree and/or incidence of AOX1 (SEQ ID NO:1), C1orf114 (SEQ ID NO:2) and HAPLN3 (SEQ ID NO:4) indicates an increased risk of PSA recurrence after radical prostatectomy. This is exemplified in table 10.

[0831] Methylation degree, methods for determining the methylation degree and an increased methylation degree is defined in the section “Determining the methylation degree and the methylation incidence”. Methylation incidence, methods for determining the methylation incidence and an increased methylation incidence is defined in the section “Determining the methylation degree and the methylation incidence”.

[0832] In one preferred embodiment of the present invention the methylation degree of a
[0833] gene selected from the group consisting of AOX1 (SEQ ID NO:1), C1orf114 (SEQ ID NO:2), GAS6 (SEQ ID NO:3), HAPLN3 (SEQ ID NO:4), ST6GALNAC3 (SEQ ID NO:5) and ZNF660 (SEQ ID NO:6), and/or
[0834] nucleotide sequence having at least 90% sequence identity with a nucleotide sequence selected from the group consisting of SEQ ID NO:1, SEQ ID NO:2, SEQ ID NO:3, SEQ ID NO:4, SEQ ID NO:5 and SEQ ID NO:6
   in a urine sample is considered to be increased and indicative of a poor outcome when said methylation degree is determined to be above 0.1%.

[0835] In another preferred embodiment of the present invention the methylation incidence of a
[0836] gene selected from the group consisting of AOX1 (SEQ ID NO:1), C1orf114 (SEQ ID NO:2), GAS6 (SEQ ID NO:3), HAPLN3 (SEQ ID NO:4), ST6GALNAC3 (SEQ ID NO:5) and ZNF660 (SEQ ID NO:6), and/or
[0837] nucleotide sequence having at least 90% sequence identity with a nucleotide sequence selected from the group consisting of SEQ ID NO:1, SEQ ID NO:2, SEQ ID NO:3, SEQ ID NO:4, SEQ ID NO:5 and SEQ ID NO:6
   in a sample is considered to be increased and indicative of a poor outcome when said methylation degree is determined to be above 0.1%.

[0838] In a more preferred embodiment of the present invention the methylation incidence of a
[0839] gene selected from the group consisting of AOX1 (SEQ ID NO:1), C1orf114 (SEQ ID NO:2), GAS6 (SEQ ID NO:3), HAPLN3 (SEQ ID NO:4), ST6GALNAC3 (SEQ ID NO:5) and ZNF660 (SEQ ID NO:6), and/or
[0840] nucleotide sequence having at least 90% sequence identity with a nucleotide sequence selected from the group consisting of SEQ ID NO:1, SEQ ID NO:2, SEQ ID NO:3, SEQ ID NO:4, SEQ ID NO:5 and SEQ ID NO:6
   in a sample is considered to be increased and indicative of a poor outcome when said methylation degree is determined to be above 0.01%.

[0841] In a particular preferred embodiment the methylation incidence of a
[0842] gene selected from the group consisting of AOX1 (SEQ ID NO:1), C1orf114 (SEQ ID NO:2), GAS6 (SEQ ID NO:3), HAPLN3 (SEQ ID NO:4), ST6GALNAC3 (SEQ ID NO:5) and ZNF660 (SEQ ID NO:6), and/or
[0843] nucleotide sequence having at least 90% sequence identity with a nucleotide sequence selected from the group consisting of SEQ ID NO:1, SEQ ID NO:2, SEQ ID NO:3, SEQ ID NO:4, SEQ ID NO:5 and SEQ ID NO:6
   in a sample is considered to be increased and indicative of a poor outcome when said methylation degree is determined to be above 0.001%.

[0844] The transcriptional/translational expression level and methods for measuring the transcriptional/translational expression level and a decreased transcriptional/translational expression level are described and defined in the sections “Determining the transcriptional expression level” and “Determining the translational expression level”.

[0845] In one embodiment of the present invention a transcriptional and/or translational level of a
[0846] gene selected from the group consisting of AOX1 (SEQ ID NO:1), C1orf114 (SEQ ID NO:2), GAS6 (SEQ ID NO:3), HAPLN3 (SEQ ID NO:4), ST6GALNAC3 (SEQ ID NO:5) and ZNF660 (SEQ ID NO:6), and/or
[0847] nucleotide sequence having at least 90% sequence identity with a nucleotide sequence selected from the group consisting of SEQ ID NO:1, SEQ ID NO: 2, SEQ ID NO:3, SEQ ID NO:4, SEQ ID NO:5 and SEQ ID NO:6
   being decreased by at least 10%, or for example at least 15%, 20%, 25%, 30%, 35%, 40%, 41%, 42%, 43%, 44%, 45%, 46%, 47%, 48%, 49%, or at least 50% and even more relative to previous measurements on the same individual, or to measurements on non-diseased tissue from the same individual, or relative to a standard level, is indicative of a poor outcome.

[0848] In another embodiment a transcriptional and/or translational level of a
[0849] gene selected from the group consisting of AOX1 (SEQ ID NO:1), C1orf114 (SEQ ID NO:2), GAS6 (SEQ ID NO:3), HAPLN3 (SEQ ID NO:4), ST6GALNAC3 (SEQ ID NO:5) and ZNF660 (SEQ ID NO:6), and/or
[0850] nucleotide sequence having at least 90% sequence identity with a nucleotide sequence selected from the group consisting of SEQ ID NO:1, SEQ ID NO:2, SEQ ID NO:3, SEQ ID NO:4, SEQ ID NO:5 and SEQ ID NO:6
   being decreased by at least 2 fold or more, such as at least 3-fold, at least 4-fold, at least 5-fold or more relative to previous measurements on the same individual, or to measurements on non-diseased tissue from the same individual, or relative to a standard level, is indicative of a poor outcome.

[0851] In a preferred embodiment of the present invention a transcriptional and/or translational level of a
[0852] gene selected from the group consisting of AOX1 (SEQ ID NO:1), C1orf114 (SEQ ID NO:2), GAS6 (SEQ ID NO:3), HAPLN3 (SEQ ID NO:4), ST6GALNAC3 (SEQ ID NO:5) and ZNF660 (SEQ ID NO:6), and/or
[0853] nucleotide sequence having at least 90% sequence identity with a nucleotide sequence selected from the group consisting of SEQ ID NO:1, SEQ ID NO:2, SEQ ID NO:3, SEQ ID NO:4, SEQ ID NO:5 and SEQ ID NO:6
   being decreased by at least 45%, or for example at least 46%, 47%, 48%, 49%, 50%, 51%, 52%, 53%, 54%, 55%, 56%, 57%, 58%, 59% or at least 60% and even more relative to previous measurements on the same individual, or to measurements on non-diseased tissue from the same individual, or relative to a standard level, is indicative of a poor outcome.

[0854] In a more preferred embodiment of the present invention a transcriptional and/or translational level of a
[0855] gene selected from the group consisting of AOX1 (SEQ ID NO:1), C1orf114 (SEQ ID NO:2), GAS6 (SEQ ID NO:3), HAPLN3 (SEQ ID NO:4), ST6GALNAC3 (SEQ ID NO:5) and ZNF660 (SEQ ID NO:6), and/or
[0856] nucleotide sequence having at least 90% sequence identity with a nucleotide sequence selected from the group consisting of SEQ ID NO:1, SEQ ID NO: 2, SEQ ID NO:3, SEQ ID NO:4, SEQ ID NO:5 and SEQ ID NO:6
   being decreased by at least 50% relative to previous measurements on the same individual, or to measurements on non-diseased tissue from the same individual, or relative to a standard level, is indicative of a poor outcome.
   Method for Assisting in Predicting and/or for Predicting the Outcome of Prostate Cancer

[0857] A method for assisting in predicting and/or for predicting the outcome of prostate cancer in an individual having developed prostate cancer comprising:
[0858] i) determining the methylation degree and/or the methylation incidence of at least one gene selected from the group consisting of AOX1 (SEQ ID NO:1), C1orf114 (SEQ ID NO:2), GAS6 (SEQ ID NO:3), HAPLN3 (SEQ ID NO:4), ST6GALNAC3 (SEQ ID NO:5) and ZNF660 (SEQ ID NO:6) or determining the methylation degree and/or the methylation incidence of at least one nucleotide sequence having at least 90% sequence identity with a nucleotide sequence selected from the group consisting of SEQ ID NO:1, SEQ ID NO:2, SEQ ID NO:3, SEQ ID NO:4, SEQ ID NO:5 and SEQ ID NO:6 or part thereof in a sample from said individual, and/or
[0859] ii) determining the transcriptional expression level of at least one gene selected from the group consisting of AOX1 (SEQ ID NO:1), C1orf114 (SEQ ID NO:2), GAS6 (SEQ ID NO:3), HAPLN3 (SEQ ID NO:4), ST6GALNAC3 (SEQ ID NO:5) and ZNF660 (SEQ ID NO:6), or nucleotide sequence having at least 90% sequence identity with at least one nucleotide sequence selected from the group consisting of SEQ ID NO:1, SEQ ID NO:2, SEQ ID NO:3, SEQ ID NO:4, SEQ ID NO:5 and SEQ ID NO:6 or part thereof in said sample, and/or
[0860] iii) determining the translational expression level of AOX1 (SEQ ID NO:1), C1orf114 (SEQ ID NO:2), GAS6 (SEQ ID NO:3), HAPLN3 (SEQ ID NO:4), ST6GALNAC3 (SEQ ID NO:5) and ZNF660 (SEQ ID NO:6), or nucleotide sequence having at least 90% sequence identity with at least one nucleotide sequence selected from the group consisting of SEQ ID NO:1, SEQ ID NO: 2, SEQ ID NO:3, SEQ ID NO:4, SEQ ID NO:5 and SEQ ID NO:6 or part thereof in said sample,
   wherein the methylation degree and/or methylation incidence of i) and/or the transcriptional level of ii) and/or the translational expression level of iii) is indicative of the outcome of prostate cancer.

[0861] The term predicting as used herein refers to predicting the outcome or course of disease following intervention for example in the form of surgery, medication etc. For example such an intervention may be radical prostatectomy.

[0862] According to this method for assisting in predicting and/or predicting the outcome of prostate cancer an increased methylation degree and/or methylation incidence is indicative of a poor outcome. Similarly, a decreased transcriptional and/or translational expression level in the sample is indicative of a poor outcome. A poor outcome may represent a decrease in the time to recurrence and/or a decrease in the time to cancer specific death for example after conservative treatment. A poor outcome may also represent an increased risk of death after conservative treatment or watchful waiting.

[0863] Methylation degree, methods for determining the methylation degree and an increased methylation degree is defined in the section “Determining the methylation degree and the methylation incidence”. Methylation incidence, methods for determining the methylation incidence and an increased methylation incidence is defined in the section “Determining the methylation degree and the methylation incidence”.

[0864] In one preferred embodiment of the present invention the methylation degree of a
[0865] gene selected from the group consisting of AOX1 (SEQ ID NO:1), C1orf114 (SEQ ID NO:2), GAS6 (SEQ ID NO:3), HAPLN3 (SEQ ID NO:4), ST6GALNAC3 (SEQ ID NO:5) and ZNF660 (SEQ ID NO:6), and/or
[0866] nucleotide sequence having at least 90% sequence identity with a nucleotide sequence selected from the group consisting of SEQ ID NO:1, SEQ ID NO:2, SEQ ID NO:3, SEQ ID NO:4, SEQ ID NO:5 and SEQ ID NO:6
   in a sample is determined to be above 20%, when said sample is a tissue sample.

[0867] In one preferred embodiment of the present invention the methylation degree of a
[0868] gene selected from the group consisting of AOX1 (SEQ ID NO:1), C1orf114 (SEQ ID NO:2), GAS6 (SEQ ID NO:3), HAPLN3 (SEQ ID NO:4), ST6GALNAC3 (SEQ ID NO:5) and ZNF660 (SEQ ID NO:6), and/or
[0869] nucleotide sequence having at least 90% sequence identity with a nucleotide sequence selected from the group consisting of SEQ ID NO:1, SEQ ID NO:2, SEQ ID NO:3, SEQ ID NO:4, SEQ ID NO:5 and SEQ ID NO:6
   in a urine sample is considered to be increased and indicative of a poor outcome being when said methylation degree is determined to be above 0.1%.

[0870] In another preferred embodiment of the present invention the methylation incidence of a
[0871] gene selected from the group consisting of AOX1 (SEQ ID NO:1), C1orf114 (SEQ ID NO:2), GAS6 (SEQ ID NO:3), HAPLN3 (SEQ ID NO:4), ST6GALNAC3 (SEQ ID NO:5) and ZNF660 (SEQ ID NO:6), and/or
[0872] nucleotide sequence having at least 90% sequence identity with a nucleotide sequence selected from the group consisting of SEQ ID NO:1, SEQ ID NO:2, SEQ ID NO:3, SEQ ID NO:4, SEQ ID NO:5 and SEQ ID NO:6
   in a sample is considered to be increased and indicative of a poor outcome being when said methylation degree is determined to be above 0.1%.

[0873] In a more preferred embodiment of the present invention the methylation incidence of a
[0874] gene selected from the group consisting of AOX1 (SEQ ID NO:1), C1orf114 (SEQ ID NO:2), GAS6 (SEQ ID NO:3), HAPLN3 (SEQ ID NO:4), ST6GALNAC3 (SEQ ID NO:5) and ZNF660 (SEQ ID NO:6), and/or
[0875] nucleotide sequence having at least 90% sequence identity with a nucleotide sequence selected from the group consisting of SEQ ID NO:1, SEQ ID NO:2, SEQ ID NO:3, SEQ ID NO:4, SEQ ID NO:5 and SEQ ID NO:6
   in a sample is considered to be increased and indicative of a poor outcome being when said methylation degree is determined to be above 0.01%.

[0876] In a particular preferred embodiment the methylation incidence of a
[0877] gene selected from the group consisting of AOX1 (SEQ ID NO:1), C1orf114 (SEQ ID NO:2), GAS6 (SEQ ID NO:3), HAPLN3 (SEQ ID NO:4), ST6GALNAC3 (SEQ ID NO:5) and ZNF660 (SEQ ID NO:6), and/or
[0878] nucleotide sequence having at least 90% sequence identity with a nucleotide sequence selected from the group consisting of SEQ ID NO:1, SEQ ID NO:2, SEQ ID NO:3, SEQ ID NO:4, SEQ ID NO:5 and SEQ ID NO:6
   in a sample is considered to be increased and indicative of a poor outcome being when said methylation degree is determined to be above 0.001%.

[0879] The transcriptional/translational expression level and methods for measuring the transcriptional/translational expression level and a decreased transcriptional/translational expression level are described and defined in the sections “Determining the transcriptional expression level” and “Determining the translational expression level”.

[0880] In one embodiment of the present invention a transcriptional and/or translational level of a
[0881] gene selected from the group consisting of AOX1 (SEQ ID NO:1), C1orf114 (SEQ ID NO:2), GAS6 (SEQ ID NO:3), HAPLN3 (SEQ ID NO:4), ST6GALNAC3 (SEQ ID NO:5) and ZNF660 (SEQ ID NO:6), and/or
[0882] nucleotide sequence having at least 90% sequence identity with a nucleotide sequence selected from the group consisting of SEQ ID NO:1, SEQ ID NO:2, SEQ ID NO:3, SEQ ID NO:4, SEQ ID NO:5 and SEQ ID NO:6
   being decreased by at least 10%, or for example at least 15%, 20%, 25%, 30%, 35%, 40%, 41%, 42%, 43%, 44%, 45%, 46%, 47%, 48%, 49%, or at least 50% and even more relative to previous measurements on the same individual, or to measurements on non-diseased tissue from the same individual, or relative to a standard level, is indicative of a poor outcome.

[0883] In another embodiment a transcriptional and/or translational level of a
[0884] gene selected from the group consisting of AOX1 (SEQ ID NO:1), C1orf114 (SEQ ID NO:2), GAS6 (SEQ ID NO:3), HAPLN3 (SEQ ID NO:4), ST6GALNAC3 (SEQ ID NO:5) and ZNF660 (SEQ ID NO:6), and/or
[0885] nucleotide sequence having at least 90% sequence identity with a nucleotide sequence selected from the group consisting of SEQ ID NO:1, SEQ ID NO:2, SEQ ID NO:3, SEQ ID NO:4, SEQ ID NO:5 and SEQ ID NO:6
   being decreased by at least 2 fold or more, such as at least 3-fold, at least 4-fold, at least 5-fold or more relative to previous measurements on the same individual, or to measurements on non-diseased tissue from the same individual, or relative to a standard level, is indicative of a poor outcome.

[0886] In a preferred embodiment of the present invention a transcriptional and/or translational level of a
[0887] gene selected from the group consisting of AOX1 (SEQ ID NO:1), C1orf114 (SEQ ID NO:2), GAS6 (SEQ ID NO:3), HAPLN3 (SEQ ID NO:4), ST6GALNAC3 (SEQ ID NO:5) and ZNF660 (SEQ ID NO:6), and/or
[0888] nucleotide sequence having at least 90% sequence identity with a nucleotide sequence selected from the group consisting of SEQ ID NO:1, SEQ ID NO: 2, SEQ ID NO:3, SEQ ID NO:4, SEQ ID NO:5 and SEQ ID NO:6
   being decreased by at least 45%, or for example at least 46%, 47%, 48%, 49%, 50%, 51%, 52%, 53%, 54%, 55%, 56%, 57%, 58%, 59% or at least 60% and even more relative to previous measurements on the same individual, or to measurements on non-diseased tissue from the same individual, or relative to a standard level, is indicative of a poor outcome.

[0889] In a more preferred embodiment of the present invention a transcriptional and/or translational level of a
[0890] gene selected from the group consisting of AOX1 (SEQ ID NO:1), C1orf114 (SEQ ID NO:2), GAS6 (SEQ ID NO:3), HAPLN3 (SEQ ID NO:4), ST6GALNAC3 (SEQ ID NO:5) and ZNF660 (SEQ ID NO:6), and/or
[0891] nucleotide sequence having at least 90% sequence identity with a nucleotide sequence selected from the group consisting of SEQ ID NO:1, SEQ ID NO:2, SEQ ID NO:3, SEQ ID NO:4, SEQ ID NO:5 and SEQ ID NO:6
   being decreased by at least 50% relative to previous measurements on the same individual, or to measurements on non-diseased tissue from the same individual, or relative to a standard level, is indicative of a poor outcome.

[0892] It is appreciated that the recurrence risk is the risk of cancer recurring after intervention, for example following surgery, radical prostatectomy, radiation therapy, cryotherapy or brachytherapy. Recurrence can occur over a wide span in time, for example 2 months after intervention, such as 3 months, 4, months, 5 months, 6 months, 1 year, two years, three years, 4 years, 5, years, after intervention or even longer. Thus, the methods of the present invention can be used over a wide span of time to determine whether recurrence has occurred.

[0893] In a preferred embodiment an increased methylation degree and/or methylation incidence is indicative of high recurrence risk of prostate cancer. It is also preferred that a decreased transcriptional and/or translational expression level is indicative of high recurrence risk of prostate cancer.

[0894] In a preferred embodiment the recurrence risk is determined following radical prostatectomy.

Method for Assisting in Monitoring and/or for Monitoring the Effect of Treatment on Prostate Cancer Progression

[0895] Another aspect of the present invention relates to a method for assisting in monitoring and/or for monitoring the effect of treatment on prostate cancer progression in an individual having developed prostate cancer and being treated for said prostate cancer, comprising:
[0896] i) determining the methylation degree and/or the methylation incidence of at least one gene selected from the group consisting of AOX1 (SEQ ID NO:1), C1orf114 (SEQ ID NO:2), GAS6 (SEQ ID NO:3), HAPLN3 (SEQ ID NO:4), ST6GALNAC3 (SEQ ID NO:5) and ZNF660 (SEQ ID NO:6) or determining the methylation degree and/or the methylation incidence of at least one nucleotide sequence having at least 90% sequence identity with a nucleotide sequence selected from the group consisting of SEQ ID NO:1, SEQ ID NO:2, SEQ ID NO:3, SEQ ID NO:4, SEQ ID NO:5 and SEQ ID NO:6 or part thereof in a sample from said individual, and/or
[0897] ii) determining the transcriptional expression level of at least one gene selected from the group consisting of AOX1 (SEQ ID NO:1), C1orf114 (SEQ ID NO:2), GAS6 (SEQ ID NO:3), HAPLN3 (SEQ ID NO:4), ST6GALNAC3 (SEQ ID NO:5) and ZNF660 (SEQ ID NO:6), or nucleotide sequence having at least 90% sequence identity with at least one nucleotide sequence selected from the group consisting of SEQ ID NO:1, SEQ ID NO:2, SEQ ID NO:3, SEQ ID NO:4, SEQ ID NO:5 and SEQ ID NO:6 or part thereof in said sample, and/or
[0898] iii) determining the translational expression level of at least one gene selected from the group consisting of AOX1 (SEQ ID NO:1), C1orf114 (SEQ ID NO:2), GAS6 (SEQ ID NO:3), HAPLN3 (SEQ ID NO:4), ST6GALNAC3 (SEQ ID NO:5) and ZNF660 (SEQ ID NO:6), or nucleotide sequence having at least 90% sequence identity with at least one nucleotide sequence selected from the group consisting of SEQ ID NO:1, SEQ ID NO:2, SEQ ID NO:3, SEQ ID NO:4, SEQ ID NO:5 and SEQ ID NO:6 or part thereof in said sample,
   wherein the methylation degree and/or methylation incidence of i) and/or the transcriptional level of ii) and/or the translational expression level of iii) is indicative of prostate cancer progression.

[0899] The term “monitoring” refers to observing or watching the progression or development of prostate cancer of an individual. The progression of prostate cancer of an individual may be monitored by frequently taking samples from the individual having prostate cancer and determining the methylation degree and/or methylation incidence and/or the transcriptional expression level and/or the translational expression level as described herein. Samples may for example be taken on a weekly or monthly basis. However, sampling frequencies may be regulated depending on the individual and the stage of cancer.

[0900] To monitor the effect of treatment, the methylation degree and/or methylation incidence and/or the transcriptional expression level and/or the translational expression level may be determined before and after treatment and compared or at different time point during treatment and compared. The methylation degree and/or methylation incidence and/or the transcriptional expression level and/or the translational expression level may in an embodiment be determined at different time points after treatment such as for example 1 week after treatment or 1 month after treatment, such as 2 months, 3 months, 4, months, 5 months, 6 months, 1 year, two years, three years, 4 years, 5, years or even more years after treatment.

[0901] According to this method for assisting in monitoring and/or for monitoring the effect of treatment on prostate cancer progression, an increased methylation degree and/or methylation incidence in a sample from an individual, when compared to the methylation degree and/or methylation incidence in a sample taken from the same individual
[0902] before treatment onset and/or
[0903] at an earlier time point during treatment
   is indicative of a progression of said prostate cancer.

[0904] Methylation degree, methods for determining the methylation degree and an increased/decreased methylation degree is defined in the section “Determining the methylation degree and the methylation incidence”. Methylation incidence, methods for determining the methylation incidence and an increased/decreased methylation incidence is defined in the section “Determining the methylation degree and the methylation incidence”.

[0905] In one preferred embodiment of the present invention, an increased methylation degree and/or methylation incidence in a sample from an individual, when compared to the methylation degree and/or methylation incidence in a sample taken from the same individual
[0906] before treatment onset and/or
[0907] at an earlier time point during treatment
   is indicative of a progression of said prostate cancer.

[0908] A methylation degree and/or methylation incidence increased by at least 10% or for example at least 15%, 20%, 25%, 30%, 35%, 40%, 41%, 42%, 43%, 44%, 45%, 46%, 47%, 48%, 49%, 50%, 55%, 60%, 65%, 70%, 80%, 90%, 100% or even more in a sample from an individual, when compared to the methylation degree and/or methylation incidence in a sample taken from the same individual
[0909] before treatment onset and/or
[0910] at an earlier time point during treatment
   is indicative of a progression of said prostate cancer.

[0911] A methylation degree and/or methylation incidence increased by at least 1.5-fold or for example at least 2-fold, 3-fold, 5-fold, 10-fold or even more in a sample from an individual, when compared to the methylation degree and/or methylation incidence in a sample taken from the same individual
[0912] before treatment onset and/or
[0913] at an earlier time point during treatment
   is indicative of a progression of said prostate cancer.

[0914] Further, a decreased methylation degree when compared to the methylation degree before treatment onset is indicative of a positive effect of the treatment and that the individual is in recovery. Similarly an increased transcriptional and/or translational expression level, when compared to the methylation degree before treatment onset, is indicative of a positive effect of the treatment and that the individual is in recovery.

[0915] A methylation degree and/or methylation incidence decreased by at least 10% or for example at least 15%, 20%, 25%, 30%, 35%, 40%, 41%, 42%, 43%, 44%, 45%, 46%, 47%, 48%, 49%, 50%, 55%, 60%, 65%, 70%, 80%, 90%, 100% or even more in a sample from an individual, when compared to the methylation degree and/or methylation incidence in a sample taken from the same individual
[0916] before treatment onset and/or
[0917] at an earlier time point during treatment
   is indicative of a positive effect of the treatment and that the individual is in recovery.

[0918] A methylation degree and/or methylation incidence in a sample decreased by at least 1.5-fold or for example at least 2-fold, 3-fold, 5-fold, 10-fold or even more in a sample from an individual, when compared to the methylation degree and/or methylation incidence in a sample taken from the same individual
[0919] before treatment onset and/or
[0920] at an earlier time point during treatment
   is indicative of a positive effect of the treatment and that the individual is in recovery.

[0921] It is preferred that a decreased transcriptional and/or translational expression level in a sample from an individual, when compared to the transcriptional and/or translational expression level in a sample taken from the same individual
[0922] before treatment onset and/or
[0923] at an earlier time point during treatment
   is indicative of a progression of said prostate cancer.

[0924] In one embodiment of the present invention a transcriptional and/or translational expression level in a sample from an individual being decreased at least 10%, or for example at least 15%, 20%, 25%, 30%, 35%, 40%, 41%, 42%, 43%, 44%, 45%, 46%, 47%, 48%, 49%, or at least 50% and even more, when compared to the transcriptional and/or translational expression level in a sample taken from the same individual
[0925] before treatment onset and/or
[0926] at an earlier time point during treatment
   is indicative of a progression of said prostate cancer.

[0927] In another embodiment of the present invention a transcriptional and/or translational level in a sample from an individual being decreased at least 2 fold or more, such as at least 3-fold, at least 4-fold, at least 5-fold or more, when compared to the transcriptional and/or translational expression level in a sample taken from the same individual
[0928] before treatment onset and/or
[0929] at an earlier time point during treatment

[0930] is indicative of a progression of said prostate cancer.

[0931] In one preferred embodiment of the present invention a transcriptional and/or translational level in a sample from an individual being decreased by at least 45%, or for example at least 46%, 47%, 48%, 49%, 50%, 51%, 52%, 53%, 54%, 55%, 56%, 57%, 58%, 59% or at least 60% and even more, when compared to the transcriptional and/or translational expression level in a sample taken from the same individual
[0932] before treatment onset and/or
[0933] at an earlier time point during treatment
   is indicative of a progression of said prostate cancer.

[0934] In a more preferred embodiment of the present invention a transcriptional and/or translational in a sample from an individual level being decreased by at least 50%, when compared to the transcriptional and/or translational expression level in a sample taken from the same individual
[0935] before treatment onset and/or
[0936] at an earlier time point during treatment
   is indicative of a progression of said prostate cancer.

[0937] In another preferred embodiment of the present invention a transcriptional and/or translational in a sample from an individual level being increased by at least 50%, when compared to the transcriptional and/or translational expression level in a sample taken from the same individual
[0938] before treatment onset and/or
[0939] at an earlier time point during treatment
   is indicative of a regression of said prostate cancer.
   Method for Assisting in Monitoring and/or for Monitoring the Progression of Prostate Cancer from a Silent/Indolent to an Aggressive Prostate Cancer

[0940] Individuals suspected of having developed prostate cancer, or suspected to be at risk of developing prostate cancer, or having been diagnosed with prostate cancer may be enrolled in an active surveillance programme. Active surveillance refers to observation and regular monitoring of outbreak without invasive treatment. Thus, active surveillance is often used when an early stage, slow-growing prostate cancer is suspected. For younger men (>10 years life expectancy), a programme of active surveillance may not mean avoiding treatment altogether, but may allow a delay of a few years or more, during which time the quality of life impact of active treatment can be avoided. Carefully selected men will not miss a window for cure with this approach. Careful selection of individuals for active surveillance ensures that the selected individuals will not be less prone to cure than other individuals.

[0941] Programmes for ‘watchful waiting’ may also be suggested when the risks of surgery, radiation therapy, or hormonal therapy outweigh the possible benefits. Other treatments can be started if symptoms develop, or if there are signs that the cancer growth is accelerating (e.g., rapidly rising PSA, increase in Gleason score on repeat biopsy, etc.).

[0942] The markers of the present invention can be used for monitoring prostate cancer progression, as independent markers, but preferably with one or more markers such as the PSA marker, the SLC18A2 gene, the ZNF132 gene and/or the TFF3 gene, and characterisation of stage and grade of the prostate cancer in said individual.

[0943] Thus, in another aspect the present invention relates to a method for assisting in monitoring and/or for monitoring the progression of prostate cancer from a silent/indolent to an aggressive prostate cancer in an individual having developed prostate cancer comprising:
[0944] i) determining the methylation degree and/or the methylation incidence of at least one gene selected from the group consisting of AOX1 (SEQ ID NO:1), C1orf114 (SEQ ID NO:2), GAS6 (SEQ ID NO:3), HAPLN3 (SEQ ID NO:4), ST6GALNAC3 (SEQ ID NO:5) and ZNF660 (SEQ ID NO:6) or determining the methylation degree and/or the methylation incidence of at least one nucleotide sequence having at least 90% sequence identity with a nucleotide sequence selected from the group consisting of SEQ ID NO:1, SEQ ID NO:2, SEQ ID NO:3, SEQ ID NO:4, SEQ ID NO:5 and SEQ ID NO:6 or part thereof in a sample from said individual, and/or
[0945] ii) determining the transcriptional expression level of at least one gene selected from the group consisting of AOX1 (SEQ ID NO:1), C1orf114 (SEQ ID NO:2), GAS6 (SEQ ID NO:3), HAPLN3 (SEQ ID NO:4), ST6GALNAC3 (SEQ ID NO:5) and ZNF660 (SEQ ID NO:6), or nucleotide sequence having at least 90% sequence identity with at least one nucleotide sequence selected from the group consisting of SEQ ID NO:1, SEQ ID NO:2, SEQ ID NO:3, SEQ ID NO:4, SEQ ID NO:5 and SEQ ID NO:6 or part thereof in said sample, and/or
[0946] iii) determining the translational expression level of at least one gene selected from the group consisting of AOX1 (SEQ ID NO:1), C1orf114 (SEQ ID NO:2), GAS6 (SEQ ID NO:3), HAPLN3 (SEQ ID NO:4), ST6GALNAC3 (SEQ ID NO:5) and ZNF660 (SEQ ID NO:6), or nucleotide sequence having at least 90% sequence identity with at least one nucleotide sequence selected from the group consisting of SEQ ID NO:1, SEQ ID NO:2, SEQ ID NO:3, SEQ ID NO:4, SEQ ID NO:5 and SEQ ID NO:6 or part thereof in said sample,
   wherein increased methylation degree and/or methylation incidence of i) and/or decreased transcriptional level of ii) and/or decreased translational expression level of iii) is indicative of the progression of prostate cancer from a silent/indolent to an aggressive prostate cancer.

[0947] In one embodiment a silent/indolent prostate cancer is a slow-growing and slow-progressing organ-confined prostate cancer with no or only minor clinical symptoms.

[0948] In one embodiment an aggressive prostate cancer is one which has progressed or will progress relatively fast (i.e. within the remaining life expectancy of a given patient) to non-organ-confined prostate cancer. In another embodiment an aggressive prostate cancer is a treatment-requiring prostate cancer.

[0949] According to this method for assisting in monitoring and/or for monitoring the progression of prostate cancer from a silent/indolent to an aggressive prostate cancer, a methylation degree and/or methylation incidence in a sample from an individual, wherein said methylation degree is increased when compared to methylation degree and/or methylation incidence in a sample taken from the same individual at an earlier time point of the course of disease of said prostate cancer, is indicative a progression of said prostate cancer. Similarly a decreased transcriptional and/or translational expression level in a sample from an individual, when compared to transcriptional and/or translational expression level in a sample taken from the same individual at an earlier time point of the course of disease of said prostate cancer, is indicative a progression of said prostate cancer.

[0950] In one embodiment a methylation degree and/or methylation incidence in a sample from an individual, wherein said methylation degree is increased by at least 10% or for example at least 15%, 20%, 25%, 30%, 35%, 40%, 41%, 42%, 43%, 44%, 45%, 46%, 47%, 48%, 49%, 50%, 55%, 60%, 65%, 70%, 80%, 90%, 100% or even more, when compared to the methylation degree in a sample taken from the same individual at an earlier time point of the course of disease of said prostate cancer, is indicative a progression of said prostate cancer.

[0951] In another embodiment a methylation degree and/or methylation incidence in a sample from an individual, wherein said methylation degree is increased by at least 1.5-fold or for example at least 2-fold, 3-fold, 5-fold, 10-fold or even more, when compared to the methylation degree in a sample taken from the same individual at an earlier time point of the course of disease of said prostate cancer, is indicative a progression of said prostate cancer.

[0952] Further, a methylation degree and/or methylation incidence in a sample from an individual, wherein said methylation degree and/or methylation incidence is decreased when compared to the methylation degree in a sample taken from the same individual at an earlier time point of the course of disease of said prostate cancer, indicates that the individual is in recovery.

[0953] A methylation degree and/or methylation incidence in a sample from an individual, wherein said methylation degree and/or methylation incidence is decreased by at least 10% or for example at least 15%, 20%, 25%, 30%, 35%, 40%, 41%, 42%, 43%, 44%, 45%, 46%, 47%, 48%, 49%, 50%, 55%, 60%, 65%, 70%, 80%, 90%, 100% or even more, when compared to the methylation degree in a sample taken from the same individual at an earlier time point of the course of disease of said prostate cancer, indicates that the individual is in recovery.

[0954] A methylation degree in a sample decreased by at least 1.5-fold or for example at least 2-fold, 3-fold, 5-fold, 10-fold or even more, when compared to the methylation degree before treatment onset is indicative of a positive effect of the treatment and that the individual is in recovery.

[0955] A decreased transcriptional and/or translational expression level in a sample from an individual, when compared to transcriptional and/or translational expression level in a sample taken from the same individual at an earlier time point of the course of disease of said prostate cancer, is indicative a progression of said prostate cancer.

[0956] In one embodiment of the present invention a transcriptional and/or translational expression level in a sample from an individual, wherein said transcriptional and/or translational expression level is decreased by at least 10%, or for example at least 15%, 20%, 25%, 30%, 35%, 40%, 41%, 42%, 43%, 44%, 45%, 46%, 47%, 48%, 49%, or at least 50% or even more when compared to the transcriptional and/or translational expression level in a sample taken from the same individual at an earlier time point of the course of disease of said prostate cancer, is indicative a progression of said prostate cancer.

[0957] In another embodiment a transcriptional and/or translational expression level in a sample from an individual, wherein said transcriptional and/or translational expression level is decreased by at least 2 fold or more, such as at least 3-fold, at least 4-fold, at least 5-fold or even more when compared to the transcriptional and/or translational expression level in a sample taken from the same individual at an earlier time point of the course of disease of said prostate cancer, is indicative a progression of said prostate cancer.

[0958] In one preferred embodiment a transcriptional and/or translational expression level in a sample from an individual, wherein said transcriptional and/or translational expression level is decreased by at least 46%, 47%, 48%, 49%, 50%, 51%, 52%, 53%, 54%, 55%, 56%, 57%, 58%, 59% or at least 60% or even more when compared to the transcriptional and/or translational expression level in a sample taken from the same individual at an earlier time point of the course of disease of said prostate cancer, is indicative a progression of said prostate cancer.

[0959] In a more preferred embodiment a transcriptional and/or translational expression level in a sample from an individual, wherein said transcriptional and/or translational expression level is decreased by at least 50% when compared to the transcriptional and/or translational expression level in a sample taken from the same individual at an earlier time point of the course of disease of said prostate cancer, is indicative a progression of said prostate cancer.

[0960] In one embodiment an increased transcriptional and/or translational expression level in a sample from an individual, wherein said transcriptional and/or translational expression level is increased when compared to the transcriptional and/or translational expression level in a sample taken from the same individual at an earlier time point of the course of disease of said prostate cancer, indicates that the individual is in recovery.

Method for Treating and/or Assisting in Determining and/or Determining the Treatment Regime of an Individual

[0961] A method for assisting in determining and/or determining the treatment regime of an individual having developed prostate cancer comprising:
[0962] i) determining the methylation degree and/or the methylation incidence of at least one gene selected from the group consisting of AOX1 (SEQ ID NO:1), C1orf114 (SEQ ID NO:2), GAS6 (SEQ ID NO:3), HAPLN3 (SEQ ID NO:4), ST6GALNAC3 (SEQ ID NO:5) and ZNF660 (SEQ ID NO:6) or determining the methylation degree and/or the methylation incidence of at least one nucleotide sequence having at least 90% sequence identity with a nucleotide sequence selected from the group consisting of SEQ ID NO:1, SEQ ID NO:2, SEQ ID NO:3, SEQ ID NO:4, SEQ ID NO:5 and SEQ ID NO:6 or part thereof in a sample from said individual, and/or
[0963] ii) determining the transcriptional expression level of at least one gene selected from the group consisting of AOX1 (SEQ ID NO:1), C1orf114 (SEQ ID NO:2), GAS6 (SEQ ID NO:3), HAPLN3 (SEQ ID NO:4), ST6GALNAC3 (SEQ ID NO:5) and ZNF660 (SEQ ID NO:6), or nucleotide sequence having at least 90% sequence identity with at least one nucleotide sequence selected from the group consisting of SEQ ID NO:1, SEQ ID NO:2, SEQ ID NO:3, SEQ ID NO:4, SEQ ID NO:5 and SEQ ID NO:6 or part thereof in said sample, and/or
[0964] iii) determining the translational expression level of at least one gene selected from the group consisting of AOX1 (SEQ ID NO:1), C1orf114 (SEQ ID NO:2), GAS6 (SEQ ID NO:3), HAPLN3 (SEQ ID NO:4), ST6GALNAC3 (SEQ ID NO:5) and ZNF660 (SEQ ID NO:6), or nucleotide sequence having at least 90% sequence identity with at least one nucleotide sequence selected from the group consisting of SEQ ID NO:1, SEQ ID NO:2, SEQ ID NO:3, SEQ ID NO:4, SEQ ID NO:5 and SEQ ID NO:6 or part thereof in said sample,
   wherein the methylation degree and/or methylation incidence of i) and/or the transcriptional level of ii) and/or the translational expression level of iii) is indicative of the treatment regime to be offered to the individual having developed prostate cancer.

[0965] In one aspect the invention concerns a method of identifying a prostate cancer patient in need of adjuvant therapy, comprising:
[0966] a) providing a sample obtained from cancerous tissue of an individual;
[0967] b) determining in the sample of a),
   [0968] the methylation level, and/or
   [0969] the transcriptional expression level, and/or
   [0970] the translational expression level,
   [0971] of one or more biomarkers, wherein the biomarkers are nucleotide sequences selected from the group consisting of:
[0972] I′) the nucleotide sequence of SEQ ID NO:3 (GAS6); or
[0973] I″) a nucleotide sequence being complementary to SEQ ID NO: 3; or
[0974] I″′) a nucleotide sequence having at least 90% sequence identity to any one of I′ or I″; or
[0975] I″″) a fragment of any one of I′, I″ or I″′, wherein the fragment comprises at least 15 consecutive nucleotides of any one of I′, I″ or I″′; and
[0976] II′) the nucleotide sequence of SEQ ID NO:4 (HAPLN3); or
[0977] II″) a nucleotide sequence being complementary to SEQ ID NO: 4; or
[0978] II″′) a nucleotide sequence having at least 90% sequence identity to any one of II′ or II″; or
[0979] II″″) a fragment of any one of II′, II″ or II″′, wherein the fragment comprises at least 15 consecutive nucleotides of any one of I′, I″ or I″′; and
[0980] III′) the nucleotide sequence of SEQ ID NO:1 (AOX1); or
[0981] III″) a nucleotide sequence being complementary to SEQ ID NO: 1; or
[0982] III″′) a nucleotide sequence having at least 90% sequence identity to any one of III′ or III″′; or
[0983] III″″) a fragment of any one of III′, III″ or III″′, wherein the fragment comprises at least 15 consecutive nucleotides of any one of III′, III″ or III″′; and
[0984] IV′) the nucleotide sequence of SEQ ID NO:2 (C1orf114); or
[0985] IV″) a nucleotide sequence being complementary to SEQ ID NO: 2; or
[0986] IV″′) a nucleotide sequence having at least 90% sequence identity to any one of IV′ or IV″; or
[0987] IV″″) a fragment of any one of IV′, IV″ or IV″′, wherein the fragment comprises at least 15 consecutive nucleotides of any one of IV′, IV″ or IV″′; and
[0988] V′) the nucleotide sequence of SEQ ID NO:5 (ST6GALNAC3); or
[0989] V″) a nucleotide sequence being complementary to SEQ ID NO: 5; or
[0990] V″′) a nucleotide sequence having at least 90% sequence identity to any one of V′ or V″; or
[0991] V″″) a fragment of any one of V′, V″ or V″′, wherein the fragment comprises at least 15 consecutive nucleotides of any one of V′, V″ or V″′; and
[0992] VI′) the nucleotide sequence of SEQ ID NO:6 (ZNF660); or
[0993] VI″) a nucleotide sequence being complementary to SEQ ID NO: 6; or
[0994] VI″′) a nucleotide sequence having at least 90% sequence identity to any one of VI′ or VI″; or
[0995] VI″″) a fragment of any one of VI′, VI″ or VI″′, wherein the fragment comprises at least 15 consecutive nucleotides of any one of VI′, VI″ or VI″′;
[0996] c) obtaining biomarker scores based on the methylation level, transcriptional level, and/or translational expression level of the sampled nucleotide sequence of b), wherein the biomarker scores indicate if the patient is in need of adjuvant therapy.

[0997] The adjuvant therapy may be selected from the group consisting of radiation therapy, chemotherapy, immunotherapy, hormone therapy, and targeted therapy.

[0998] In one aspect the invention concerns a method of treating a prostate cancer patient comprising determining at least one clinical parameter for said patient, determining the status of at least one gene selected from the group consisting of C1orf114 (SEQ ID NO:2), HAPLN3 (SEQ ID NO:4), AOX1 (SEQ ID NO:1), GAS6 (SEQ ID NO:3), ST6GALNAC3 (SEQ ID NO:5) and ZNF660 (SEQ ID NO:6), in a sample obtained from the patient, and (a) recommending, prescribing or initiating active treatment if said patient has at least one risk-associated clinical parameter and an elevated status for said gene, or (b) recommending, prescribing or initiating watchful waiting if said patient has neither a risk-associated clinical parameter nor an elevated status for said gene or genes.

[0999] The term “treatment regime” refers to a strategy for treatment of an individual. Determining the treatment regime of an individual means choosing a strategy for treatment of the individual. The treatment regime or the strategy for treatment of an individual having developed prostate cancer is determined based on the method as described above.

[1000] For example, in case of T1 and T2 cancers, which are found only in the prostate, the preferred treatment regime will be surgery. In case of T3 and T4 cancers, which have spread elsewhere, the preferred treatment regime will be radiation therapy. However, it is often difficult to determine whether the cancer has developed into a T3 or T4 stage.

[1001] Thus, in one embodiment an increased methylation degree and/or methylation incidence will indicate that the treatment regime should be radiation therapy. Similarly, a decreased transcriptional and/or translational expression level will indicate that the treatment regime should be radiation therapy.

[1002] In particular an increased methylation degree and an increased methylation incidence may be as described above, and a decreased transcriptional and/or translational expression level may be as described above.

[1003] In one embodiment of the present invention a transcriptional and/or translational expression level in a sample from an individual, wherein said transcriptional and/or translational expression level is decreased by at least 10%, or for example at least 15%, 20%, 25%, 30%, 35%, 40%, 41%, 42%, 43%, 44%, 45%, 46%, 47%, 48%, 49%, or at least 50% and even more when compared to previous measurements on the same individual, or to measurements on non-diseased tissue from the same individual, or relative to a standard level, will indicate that the treatment regime should be radiation therapy.

[1004] In another embodiment a transcriptional and/or translational level in a sample from an individual, wherein said transcriptional and/or translational expression level is decreased by at least 2 fold or more, such as at least 3-fold, at least 4-fold, at least 5-fold or more relative to previous measurements on the same individual, or to measurements on non-diseased tissue from the same individual, or relative to a standard level, will indicate that the treatment regime should be radiation therapy.

[1005] In one preferred embodiment of the present invention a transcriptional and/or translational expression level in a sample from an individual, wherein said transcriptional and/or translational expression level is decreased by at least 45%, or for example at least 46%, 47%, 48%, 49%, 50%, 51%, 52%, 53%, 54%, 55%, 56%, 57%, 58%, 59% or at least 60% and even more relative to previous measurements on the same individual, or to measurements on non-diseased tissue from the same individual, or relative to a standard level, will indicate that the treatment regime should be radiation therapy.

[1006] In a more preferred embodiment a transcriptional and/or translational expression level in a sample from an individual, wherein said transcriptional and/or translational expression level is decreased by at least 50% relative to previous measurements on the same individual, or to measurements on non-diseased tissue from the same individual, or relative to a standard level, will indicate that the treatment regime should be radiation therapy.

[1007] The methods as described herein may optionally comprise:

i) determining the methylation degree and/or methylation incidence of at least one gene selected from the group consisting of AOX1 (SEQ ID NO:1), C1orf114 (SEQ ID NO:2), GAS6 (SEQ ID NO:3), HAPLN3 (SEQ ID NO:4), ST6GALNAC3 (SEQ ID NO:5) and ZNF660 (SEQ ID NO:6) or nucleotide sequence having at least 90% sequence identity with a nucleotide sequence selected from the group consisting of SEQ ID NO:1, SEQ ID NO:2, SEQ ID NO:3, SEQ ID NO:4, SEQ ID NO:5 and SEQ ID NO:6, or part thereof in a control sample
ii) determining the methylation degree and/or methylation incidence of at least one gene selected from the group consisting of AOX1 (SEQ ID NO:1), C1orf114 (SEQ ID NO:2), GAS6 (SEQ ID NO:3), HAPLN3 (SEQ ID NO:4), ST6GALNAC3 (SEQ ID NO:5) and ZNF660 (SEQ ID NO:6) as identified in i) in a sample from said individual
iii) comparing the methylation degree and/or methylation incidence determined in i) and ii)
wherein if the methylation degree and/or methylation incidence determined in ii) is higher than the methylation degree and/or methylation incidence determined in i) then the methylation degree and/or methylation incidence is increased and wherein if the methylation degree and/or methylation incidence determined in ii) is lower than the methylation degree and/or methylation incidence determined in i) then the methylation degree and/or methylation incidence is decreased.

[1008] Further, the methods as described herein may optionally comprise a step of comparing the transcriptional and/or translational expression level in the sample to the expression level of a control sample, wherein the expression level in the sample is increased, when it is higher than the expression level in said control sample or decreased when it is lower than the expression level in said control sample. Such a control sample is described in the sections “Determining transcriptional expression level” and “Determining translational expression level”. In one embodiment the translational expression level of AOX1, C1orf114, GAS6, HAPLN3, ST6GALNAC3 and/or ZNF660 is determined by immunohistochemical analysis.

[1009] In one embodiment, the sample of the methods as described herein is a tissue sample. In a preferred embodiment the tissue sample is a biopsy of the prostate gland or resected prostate tissue. In another embodiment the sample is a body fluid sample such as a blood, serum, semen, plasma or urine sample.

Combination with Other Biomarkers

[1010] The present invention provides a marker which can be used independently of other markers or in combination with other markers and techniques. The AOX1, C1orf114, GAS6, HAPLN3, ST6GALNAC3 and/or ZNF660 markers of the present invention may for example be used in combination with a panel of genetic biomarkers as described below. Thus, the methods for assisting in diagnosing and/or for diagnosing prostate cancer in an individual cancer and/or for assisting in prognosing and/or for prognosing the disease progression of prostate cancer in an individual having developed prostate cancer and/or for assisting in predicting and/or for predicting the outcome of prostate cancer in an individual having developed prostate cancer and/or for assisting in monitoring and/or for monitoring the effect of treatment on prostate cancer progression in an individual having developed prostate cancer and being treated for said prostate cancer and/or for assisting in monitoring and/or for monitoring the progression of prostate cancer from a silent/indolent to an aggressive prostate cancer in an individual having developed prostate cancer and/or for assisting in determining and/or determining the treatment regime of an individual having developed prostate cancer may further comprise determining the methylation degree and/or translational level and/or transcriptional level of one or more biomarkers.

[1011] In certain embodiments, it may be advantageous to combine different genes in a panel of genes. In one such aspect concerning diagnostic use of all six genes in combination, a method is provided for determining if an individual has, or is at risk of developing prostate cancer, the method comprising the steps of:
[1012] a) providing a sample obtained from said individual;
[1013] b) determining in the sample of a),
   [1014] the methylation level, and/or
   [1015] the transcriptional expression level, and/or
   [1016] the translational expression level,
[1017] of a panel of nucleotide sequences, wherein the panel comprises:
[1018] I′) the nucleotide sequence of SEQ ID NO:3 (GAS6); or
[1019] I″) a nucleotide sequence being complementary to SEQ ID NO: 3; or
[1020] I″′) a nucleotide sequence having at least 90% sequence identity to any one of I′ or I″; or
[1021] I″″) a fragment of any one of I′, I″ or I″′, wherein the fragment comprises at least 15 consecutive nucleotides of any one of I′, I″ or I″′; and
[1022] II′) the nucleotide sequence of SEQ ID NO:4 (HAPLN3); or
[1023] II″) a nucleotide sequence being complementary to SEQ ID NO: 4; or
[1024] II″′) a nucleotide sequence having at least 90% sequence identity to any one of II′ or II″; or
[1025] II″″) a fragment of any one of II′, II″ or I″′, wherein the fragment comprises at least 15 consecutive nucleotides of any one of I′, I″ or I″′; and
[1026] III′) the nucleotide sequence of SEQ ID NO:1 (AOX1); or
[1027] III″) a nucleotide sequence being complementary to SEQ ID NO: 1; or
[1028] III″′) a nucleotide sequence having at least 90% sequence identity to any one of III′ or III″′; or
[1029] III″″) a fragment of any one of III′, III″ or III″′, wherein the fragment comprises at least 15 consecutive nucleotides of any one of III′, III″ or III″′; and
[1030] IV′) the nucleotide sequence of SEQ ID NO:2 (C1orf114); or

[1031] IV″) a nucleotide sequence being complementary to SEQ ID NO: 2; or
[1032] IV″′) a nucleotide sequence having at least 90% sequence identity to any one of IV′ or IV″; or
[1033] IV″″) a fragment of any one of IV′, IV″ or IV″′, wherein the fragment comprises at least 15 consecutive nucleotides of any one of IV′, IV″ or IV″′; and
[1034] V′) the nucleotide sequence of SEQ ID NO:5 (ST6GALNAC3); or
[1035] V″) a nucleotide sequence being complementary to SEQ ID NO: 5; or
[1036] V″′) a nucleotide sequence having at least 90% sequence identity to any one of V′ or V″; or
[1037] V″″) a fragment of any one of V′, V″ or V″′, wherein the fragment comprises at least 15 consecutive nucleotides of any one of V′, V″ or V″′; and
[1038] VI′) the nucleotide sequence of SEQ ID NO:6 (ZNF660); or
[1039] VI″) a nucleotide sequence being complementary to SEQ ID NO: 6; or
[1040] VI″′) a nucleotide sequence having at least 90% sequence identity to any one of VI′ or VI″; or
[1041] VI″″) a fragment of any one of VI′, VI″ or VI″′, wherein the fragment comprises at least 15 consecutive nucleotides of any one of VI′, VI″ or VI″′;
[1042] c) comparing
   [1043] the methylation level, transcriptional level, and/or translational expression level of the sampled nucleotide sequence of b), with the corresponding methylation level, transcriptional level, and/or translational expression level of a corresponding nucleotide sequence of a control sample, wherein a methylation level being significantly higher than the methylation level of the control sample, and/or a transcriptional and/or a translational expression level being significantly lower than the transcriptional level of the control sample, is indicative of that the individual has, or is at risk of developing prostate cancer.

[1044] While the six genes may be used in common for diagnostic purposes, different combinations can be designed for specific purposes by the person of skill in the art based on the data presented e.g. in tables 16 and 17. The six genes identified by the present inventors may thus be arranged in panels and optimised for e.g. diagnostic or prognostic purposes respectively. Thus in one aspect, the invention concerns a method of determining if an individual has, or is at risk of developing prostate cancer, the method comprising the steps of:
[1045] a) providing a sample obtained from said individual;
[1046] b) determining in the sample of a),
   [1047] the methylation level, and/or
   [1048] the transcriptional expression level, and/or
   [1049] the translational expression level,
[1050] of a panel comprising at least two nucleotide sequences, wherein the panel
[1051] is selected from the group consisting of:
[1052] i) C1orf114 (SEQ ID NO:2) and GAS6 (SEQ ID NO:3);
[1053] ii) GAS6 (SEQ ID NO:3) and HAPLN3 (SEQ ID NO:4);
[1054] iii) C1orf114 (SEQ ID NO:2), GAS6 (SEQ ID NO:3) and HAPLN3 (SEQ ID NO:4);
[1055] iv) AOX1 (SEQ ID NO:1), C1orf114 (SEQ ID NO:2), GAS6 (SEQ ID NO:3) and HAPLN3 (SEQ ID NO:4);
[1056] v) AOX1 (SEQ ID NO:1), GAS6 (SEQ ID NO:3) and HAPLN3 (SEQ ID NO:4);
[1057] vi) AOX1 (SEQ ID NO:1), C1orf114 (SEQ ID NO:2) and GAS6 (SEQ ID NO:3);
[1058] vii) AOX1 (SEQ ID NO:1) and GAS6 (SEQ ID NO:3);
[1059] viii) C1orf114 (SEQ ID NO:2) and HAPLN3 (SEQ ID NO:4);
[1060] ix) AOX1 (SEQ ID NO:1), C1orf114 (SEQ ID NO:2) and HAPLN3 (SEQ ID NO:4);
[1061] x) AOX1 (SEQ ID NO:1) and HAPLN3 (SEQ ID NO:4);
[1062] xi) AOX1 (SEQ ID NO:1) and C1orf114 (SEQ ID NO:2);
[1063] xii) AOX1 (SEQ ID NO:1) and ST6GALNAC3 (SEQ ID NO:5);
[1064] xiii) AOX1 (SEQ ID NO:1) and ZNF660 (SEQ ID NO:6);
[1065] xiv) C1orf114 (SEQ ID NO:2) and ST6GALNAC3 (SEQ ID NO:5);
[1066] xv) C1orf114 (SEQ ID NO:2) and ZNF660 (SEQ ID NO:6);
[1067] xvi) GAS6 (SEQ ID NO:3) and ST6GALNAC3 (SEQ ID NO:5);
[1068] xvii) GAS6 (SEQ ID NO:3) and ZNF660 (SEQ ID NO:6);
[1069] xviii) HAPLN3 (SEQ ID NO:4) and ST6GALNAC3 (SEQ ID NO:5);
[1070] xix) HAPLN3 (SEQ ID NO:4) and ZNF660 (SEQ ID NO:6);
[1071] xx) ST6GALNAC3 (SEQ ID NO:5) and ZNF660 (SEQ ID NO:6);
[1072] xxi) AOX1 (SEQ ID NO:1), C1orf114 (SEQ ID NO:2) and ST6GALNAC3 (SEQ ID NO:5);
[1073] xxii) AOX1 (SEQ ID NO:1), C1orf114 (SEQ ID NO:2) and ZNF660 (SEQ ID NO:6);
[1074] xxiii) AOX1 (SEQ ID NO:1), GAS6 (SEQ ID NO:3) and ST6GALNAC3 (SEQ ID NO:5);
[1075] xxiv) AOX1 (SEQ ID NO:1), GAS6 (SEQ ID NO:3) and ZNF660 (SEQ ID NO:6);
[1076] xxv) AOX1 (SEQ ID NO:1), HAPLN3 (SEQ ID NO:4) and ST6GALNAC3 (SEQ ID NO:5);
[1077] xxvi) AOX1 (SEQ ID NO:1), HAPLN3 (SEQ ID NO:4) and ZNF660 (SEQ ID NO:6);
[1078] xxvii) AOX1 (SEQ ID NO:1), ST6GALNAC3 (SEQ ID NO:5) and ZNF660 (SEQ ID NO:6);
[1079] xxviii) C1orf114 (SEQ ID NO:2), GAS6 (SEQ ID NO:3) and ST6GALNAC3 (SEQ ID NO:5);
[1080] xxix) C1orf114 (SEQ ID NO:2), GAS6 (SEQ ID NO:3) and ZNF660 (SEQ ID NO:6);
[1081] xxx) C1orf114 (SEQ ID NO:2), HAPLN3 (SEQ ID NO:4) and ST6GALNAC3 (SEQ ID NO:5);
[1082] xxxi) C1orf114 (SEQ ID NO:2), HAPLN3 (SEQ ID NO:4) and ZNF660 (SEQ ID NO:6);
[1083] xxxii) C1orf114 (SEQ ID NO:2), ST6GALNAC3 (SEQ ID NO:5) and ZNF660 (SEQ ID NO:6);
[1084] xxxiii) GAS6 (SEQ ID NO:3), HAPLN3 (SEQ ID NO:4) and ST6GALNAC3 (SEQ ID NO:5);
[1085] xxxiv) GAS6 (SEQ ID NO:3), HAPLN3 (SEQ ID NO:4) and ZNF660 (SEQ ID NO:6);
[1086] xxxv) GAS6 (SEQ ID NO:3), ST6GALNAC3 (SEQ ID NO:5) and ZNF660 (SEQ ID NO:6);
[1087] xxxvi) HAPLN3 (SEQ ID NO:4), ST6GALNAC3 (SEQ ID NO:5) and ZNF660 (SEQ ID NO:6);
[1088] xxxvii) AOX1 (SEQ ID NO:1), C1orf114 (SEQ ID NO:2) and GAS6 (SEQ ID NO:3) and ST6GALNAC3 (SEQ ID NO:5);
[1089] xxxviii) AOX1 (SEQ ID NO:1), C1orf114 (SEQ ID NO:2) GAS6 (SEQ ID NO:3) and ZNF660 (SEQ ID NO:6);
[1090] xxxix) AOX1 (SEQ ID NO:1), C1orf114 (SEQ ID NO:2), HAPLN3 (SEQ ID NO:4),
[1091] xl) AOX1 (SEQ ID NO:1), C1orf114 (SEQ ID NO:2), HAPLN3 (SEQ ID NO:4), and ST6GALNAC3 (SEQ ID NO:5);
[1092] xli) AOX1 (SEQ ID NO:1), C1orf114 (SEQ ID NO:2), ST6GALNAC3 (SEQ ID NO:5) and ZNF660 (SEQ ID NO:6);
[1093] xlii) AOX1 (SEQ ID NO:1), GAS6 (SEQ ID NO:3), HAPLN3 (SEQ ID NO:4) and ST6GALNAC3 (SEQ ID NO:5);
[1094] xliii) AOX1 (SEQ ID NO:1), GAS6 (SEQ ID NO:3) and HAPLN3 (SEQ ID NO:4);
[1095] xliv) AOX1 (SEQ ID NO:1), GAS6 (SEQ ID NO:3) and ST6GALNAC3 (SEQ ID NO:5);
[1096] xlv) AOX1 (SEQ ID NO:1), HAPLN3 (SEQ ID NO:4), ST6GALNAC3 (SEQ ID NO:5) and ZNF660 (SEQ ID NO:6);
[1097] xlvi) C1orf114 (SEQ ID NO:2), GAS6 (SEQ ID NO:3), HAPLN3 (SEQ ID NO:4) and ST6GALNAC3 (SEQ ID NO:5);
[1098] xlvii) C1orf114 (SEQ ID NO:2), GAS6 (SEQ ID NO:3), HAPLN3 (SEQ ID NO:4) and ZNF660 (SEQ ID NO:6);
[1099] xlviii) C1orf114 (SEQ ID NO:2), GAS6 (SEQ ID NO:3), ST6GALNAC3 (SEQ ID NO:5) and ZNF660 (SEQ ID NO:6);
[1100] xlix) C1orf114 (SEQ ID NO:2), HAPLN3 (SEQ ID NO:4), ST6GALNAC3 (SEQ ID NO:5) and ZNF660 (SEQ ID NO:6);
[1101] l) GAS6 (SEQ ID NO:3), HAPLN3 (SEQ ID NO:4), ST6GALNAC3 (SEQ ID NO:5) and ZNF660 (SEQ ID NO:6);
[1102] li) AOX1 (SEQ ID NO:1), C1orf114 (SEQ ID NO:2), GAS6 (SEQ ID NO:3), HAPLN3 (SEQ ID NO:4) and ST6GALNAC3 (SEQ ID NO:5);
[1103] lii) AOX1 (SEQ ID NO:1), C1orf114 (SEQ ID NO:2), GAS6 (SEQ ID NO:3), HAPLN3 (SEQ ID NO:4) and ZNF660 (SEQ ID NO:6);
[1104] liii) AOX1 (SEQ ID NO:1), C1orf114 (SEQ ID NO:2), GAS6 (SEQ ID NO:3), ST6GALNAC3 (SEQ ID NO:5) and ZNF660 (SEQ ID NO:6);
[1105] liv) AOX1 (SEQ ID NO:1), C1orf114 (SEQ ID NO:2), HAPLN3 (SEQ ID NO:4), ST6GALNAC3 (SEQ ID NO:5) and ZNF660 (SEQ ID NO:6);
[1106] lv) AOX1 (SEQ ID NO:1), GAS6 (SEQ ID NO:3), HAPLN3 (SEQ ID NO:4), ST6GALNAC3 (SEQ ID NO:5) and ZNF660 (SEQ ID NO:6);
[1107] lvi) C1orf114 (SEQ ID NO:2), GAS6 (SEQ ID NO:3), HAPLN3 (SEQ ID NO:4),
[1108] lvii) ST6GALNAC3 (SEQ ID NO:5) and ZNF660 (SEQ ID NO:6); AOX1 (SEQ ID NO:1), C1orf114 (SEQ ID NO:2), GAS6 (SEQ ID NO:3), HAPLN3 (SEQ ID NO:4), ST6GALNAC3 (SEQ ID NO:5) and ZNF660 (SEQ ID NO:6);
   [1109] wherein any one of said SEQ ID NO: 1, 2, 3, 4, 5 or 6 of said panels i) through lvii) optionally is individually replaced by:
   [1110] b′) a nucleotide sequence being complementary to any one of said SEQ ID NO:s 1, 2, 3, 4, 5 or 6 of said panels i) through lvii); or
   [1111] b″) a nucleotide sequence having at least 90% sequence identity to any one of said SEQ ID NO:s 1, 2, 3, 4, 5 or 6 of said panels i) through lvii), or the complementary nucleotide sequences of b′); or
   [1112] b″′) a fragment comprising at least 15 consecutive nucleotides of any one of said SEQ ID NO:s 1, 2, 3, 4, 5 or 6 of said panels i) through lvii), or the nucleotide sequences of b′), or the nucleotide sequences of b″);
[1113] c) comparing the methylation level, transcriptional level, and/or translational expression level of the sampled nucleotide sequences of b), with the corresponding methylation level, transcriptional level, and/or translational expression level of a corresponding nucleotide sequences of a control sample, wherein
   [1114] a methylation level being significantly higher than the methylation level of the control sample, and/or a transcriptional and/or a translational expression level being significantly lower than the transcriptional level of the control sample, is indicative of that the individual has, or is at risk of developing prostate cancer.

[1115] As mentioned above, panels of different combinations of genes have been designed and, wherein each panel is suitable for a particular purpose. One such purpose is to prognosing, i.e. determining disease progression of prostate cancer. Thus in one important aspect the invention concerns a method for prognosing disease progression of prostate cancer in a patient, said method comprising the steps of:
[1116] a) providing a sample obtained from cancerous tissue of an individual;
[1117] b) determining in the sample of a),
[1118] the methylation level, and/or
[1119] the transcriptional expression level, and/or
[1120] the translational expression level,
[1121] of a panel comprising one or more nucleotide sequences, wherein the panel is selected from the group consisting of:
[1122] i) C1orf114 (SEQ ID NO:2) and HAPLN3 (SEQ ID NO:4);
[1123] ii) AOX (SEQ ID NO:1) and C1orf114 (SEQ ID NO:2);
[1124] iii) AOX (SEQ ID NO:1), C1orf114 (SEQ ID NO:2) and GAS6 (SEQ ID NO:3);
[1125] iv) C1orf114 (SEQ ID NO:2), GAS6 (SEQ ID NO:3) and HAPLN3 (SEQ ID NO:4);
[1126] v) C1orf114 (SEQ ID NO:2);
[1127] vi) AOX (SEQ ID NO:1), C1orf114 (SEQ ID NO:2) and HAPLN3 (SEQ ID NO:4);
[1128] vii) AOX (SEQ ID NO:1), C1orf114 (SEQ ID NO:2), GAS6 (SEQ ID NO:3) and HAPLN3 (SEQ ID NO:4);
[1129] viii) C1orf114 (SEQ ID NO:2) and GAS6 (SEQ ID NO:3);
[1130] ix) AOX (SEQ ID NO:1) and GAS6 (SEQ ID NO:3);
[1131] x) AOX (SEQ ID NO:1);
[1132] xi) HAPLN3 (SEQ ID NO:4);
[1133] xii) AOX (SEQ ID NO:1) and HAPLN3 (SEQ ID NO:4);
[1134] xiii) AOX (SEQ ID NO:1), GAS6 (SEQ ID NO:3) and HAPLN3 (SEQ ID NO:4);
[1135] xiv) GAS6 (SEQ ID NO:3) and HAPLN3 (SEQ ID NO:4);
[1136] xv) GAS6 (SEQ ID NO:3);
[1137] xvi) ST6GALNAC3 (SEQ ID NO:5);
[1138] xvii) ZNF660 (SEQ ID NO:6);
[1139] xviii) AOX (SEQ ID NO:1) and ST6GALNAC3 (SEQ ID NO:5);
[1140] xix) AOX (SEQ ID NO:1) and ZNF660 (SEQ ID NO:6);
[1141] xx) C1orf114 (SEQ ID NO:2) and ST6GALNAC3 (SEQ ID NO:5);
[1142] xxi) C1orf114 (SEQ ID NO:2) and ZNF660 (SEQ ID NO:6);
[1143] xxii) GAS6 (SEQ ID NO:3) and ST6GALNAC3 (SEQ ID NO:5);
[1144] xxiii) GAS6 (SEQ ID NO:3) and ZNF660 (SEQ ID NO:6);
[1145] xxiv) HAPLN3 (SEQ ID NO:4) and ST6GALNAC3 (SEQ ID NO:5);
[1146] xxv) HAPLN3 (SEQ ID NO:4) and ZNF660 (SEQ ID NO:6);
[1147] xxvi) ST6GALNAC3 (SEQ ID NO:5) and ZNF660 (SEQ ID NO:6);
[1148] xxvii) AOX (SEQ ID NO:1), C1orf114 (SEQ ID NO:2) and ST6GALNAC3 (SEQ ID NO:5);
[1149] xxviii) AOX (SEQ ID NO:1), C1orf114 (SEQ ID NO:2) and ZNF660 (SEQ ID NO:6);
[1150] xxix) AOX (SEQ ID NO:1), GAS6 (SEQ ID NO:3) and ST6GALNAC3 (SEQ ID NO:5);
[1151] xxx) AOX (SEQ ID NO:1), GAS6 (SEQ ID NO:3) and ZNF660 (SEQ ID NO:6);
[1152] xxxi) AOX (SEQ ID NO:1), HAPLN3 (SEQ ID NO:4) and ST6GALNAC3 (SEQ ID NO:5);
[1153] xxxii) AOX (SEQ ID NO:1), HAPLN3 (SEQ ID NO:4) and ZNF660 (SEQ ID NO:6);
[1154] xxxiii) AOX (SEQ ID NO:1), ST6GALNAC3 (SEQ ID NO:5) and ZNF660 (SEQ ID NO:6);
[1155] xxxiv) C1orf114 (SEQ ID NO:2), GAS6 (SEQ ID NO:3) and ST6GALNAC3 (SEQ ID NO:5);
[1156] xxxv) C1orf114 (SEQ ID NO:2), GAS6 (SEQ ID NO:3) and ZNF660 (SEQ ID NO:6);
[1157] xxxvi) C1orf114 (SEQ ID NO:2), HAPLN3 (SEQ ID NO:4) and ST6GALNAC3 (SEQ ID NO:5);
[1158] xxxvii) C1orf114 (SEQ ID NO:2), HAPLN3 (SEQ ID NO:4) and ZNF660 (SEQ ID NO:6);
[1159] xxxviii) C1orf114 (SEQ ID NO:2), ST6GALNAC3 (SEQ ID NO:5) and ZNF660 (SEQ ID NO:6);
[1160] xxxix) GAS6 (SEQ ID NO:3), HAPLN3 (SEQ ID NO:4) and ST6GALNAC3 (SEQ ID NO:5);
[1161] xl) GAS6 (SEQ ID NO:3), HAPLN3 (SEQ ID NO:4) and ZNF660 (SEQ ID NO:6);
[1162] xli) GAS6 (SEQ ID NO:3), ST6GALNAC3 (SEQ ID NO:5) and ZNF660 (SEQ ID NO:6);
[1163] xlii) HAPLN3 (SEQ ID NO:4), ST6GALNAC3 (SEQ ID NO:5) and ZNF660 (SEQ ID NO:6);
[1164] xliii) AOX (SEQ ID NO:1), C1orf114 (SEQ ID NO:2), GAS6 (SEQ ID NO:3) and ST6GALNAC3 (SEQ ID NO:5);
[1165] xliv) AOX (SEQ ID NO:1), C1orf114 (SEQ ID NO:2), GAS6 (SEQ ID NO:3) and ZNF660 (SEQ ID NO:6);
[1166] xlv) AOX (SEQ ID NO:1), C1orf114 (SEQ ID NO:2), HAPLN3 (SEQ ID NO:4) and ST6GALNAC3 (SEQ ID NO:5);
[1167] xlvi) AOX (SEQ ID NO:1), C1orf114 (SEQ ID NO:2), HAPLN3 (SEQ ID NO:4) and ZNF660 (SEQ ID NO:6);
[1168] xlvii) AOX (SEQ ID NO:1), C1orf114 (SEQ ID NO:2), ST6GALNAC3 (SEQ ID NO:5) and ZNF660 (SEQ ID NO:6);
[1169] xlviii) AOX (SEQ ID NO:1), GAS6 (SEQ ID NO:3), HAPLN3 (SEQ ID NO:4) and ST6GALNAC3 (SEQ ID NO:5);
[1170] xlix) AOX (SEQ ID NO:1), GAS6 (SEQ ID NO:3), HAPLN3 (SEQ ID NO:4) and ZNF660 (SEQ ID NO:6);
[1171] l) AOX (SEQ ID NO:1), GAS6 (SEQ ID NO:3), ST6GALNAC3 (SEQ ID NO:5) and ZNF660 (SEQ ID NO:6);
[1172] li) AOX (SEQ ID NO:1), HAPLN3 (SEQ ID NO:4), ST6GALNAC3 (SEQ ID NO:5) and ZNF660 (SEQ ID NO:6);
[1173] lii) C1orf114 (SEQ ID NO:2), GAS6 (SEQ ID NO:3), HAPLN3 (SEQ ID NO:4) and ST6GALNAC3 (SEQ ID NO:5);
[1174] liii) C1orf114 (SEQ ID NO:2), GAS6 (SEQ ID NO:3), HAPLN3 (SEQ ID NO:4) and ZNF660 (SEQ ID NO:6);
[1175] liv) C1orf114 (SEQ ID NO:2), GAS6 (SEQ ID NO:3), ST6GALNAC3 (SEQ ID NO:5) and ZNF660 (SEQ ID NO:6);
[1176] lv) C1orf114 (SEQ ID NO:2), HAPLN3 (SEQ ID NO:4), ST6GALNAC3 (SEQ ID NO:5) and ZNF660 (SEQ ID NO:6);
[1177] lvi) GAS6 (SEQ ID NO:3), HAPLN3 (SEQ ID NO:4), ST6GALNAC3 (SEQ ID NO:5) and ZNF660 (SEQ ID NO:6);
[1178] lvii) AOX (SEQ ID NO:1), C1orf114 (SEQ ID NO:2), GAS6 (SEQ ID NO:3), HAPLN3 (SEQ ID NO:4) and ST6GALNAC3 (SEQ ID NO:5);
[1179] lviii) AOX (SEQ ID NO:1), C1orf114 (SEQ ID NO:2), GAS6 (SEQ ID NO:3), HAPLN3 (SEQ ID NO:4) and ZNF660 (SEQ ID NO:6);
[1180] lix) AOX (SEQ ID NO:1), C1orf114 (SEQ ID NO:2), GAS6 (SEQ ID NO:3), ST6GALNAC3 (SEQ ID NO:5) and ZNF660 (SEQ ID NO:6);
[1181] lx) AOX (SEQ ID NO:1), C1orf114 (SEQ ID NO:2), HAPLN3 (SEQ ID NO:4), ST6GALNAC3 (SEQ ID NO:5) and ZNF660 (SEQ ID NO:6);
[1182] lxi) AOX (SEQ ID NO:1), GAS6 (SEQ ID NO:3), HAPLN3 (SEQ ID NO:4), ST6GALNAC3 (SEQ ID NO:5) and ZNF660 (SEQ ID NO:6);
[1183] lxii) C1orf114 (SEQ ID NO:2), GAS6 (SEQ ID NO:3), HAPLN3 (SEQ ID NO:4), ST6GALNAC3 (SEQ ID NO:5) and ZNF660 (SEQ ID NO:6);
[1184] lxiii) AOX (SEQ ID NO:1), C1orf114 (SEQ ID NO:2), GAS6 (SEQ ID NO:3), HAPLN3 (SEQ ID NO:4), ST6GALNAC3 (SEQ ID NO:5) and ZNF660 (SEQ ID NO:6);
[1185] wherein any one of said SEQ ID NO: 1, 2, 3, 4, 5 or 6 of said panels i) through lxiii) optionally is individually replaced by:
[1186] b′) a nucleotide sequence being complementary to any one of said SEQ ID NO:s 1, 2, 3, 4, 5 or 6 of said panels i) through lvii); or
[1187] b″) a nucleotide sequence having at least 90% sequence identity to any one of said SEQ ID NO:s 1, 2, 3, 4, 5 or 6 of said panels i) through lvii), or the complementary nucleotide sequences of b′); or
[1188] b″′) a fragment comprising at least 15 consecutive nucleotides of any one of said SEQ ID NO:s 1, 2, 3, 4, 5 or 6 of said panels i) through lvii), or the nucleotide sequences of b′), or the nucleotide sequences of b″);
[1189] c) obtaining a biomarker score based on the methylation level, transcriptional level, and/or translational expression level of the sampled nucleotide sequence of b), wherein the biomarker score is indicative of the prognosis of the prostate cancer patient.

[1190] PSA (Prostate Specific Antigen) is a protein produced by both normal and cancerous prostate cells. A PSA level of 3 ng/mL or less is considered to be in the normal range for a man under 60 years old, whereas 4 ng/mL or less is normal for a man aged 60 to 69 years. A PSA level of 5 ng/mL or less is normal if you are aged over 70.

[1191] In one embodiment the individual as described in the methods of the present invention has a normal prostate specific antigen (PSA) level. In another embodiment the individual as described in the methods of the present invention has a PSA level higher than a normal PSA level. It is preferred that a normal PSA level is a PSA level of at the most 3 ng per mL serum.

[1192] Tumour recurrence is often measured by increased levels of PSA defined as PSA level greater than or equal to 0.1 ng/mL serum measured at least one month after for example surgery. Individuals having PSA levels above 0.1 ng/mL serum measured less than 1 month after surgery, are not considered to suffer from reoccurrence but rather an indication that the primary tumour was not removed, for example in the event of advanced cancer at the time of surgery. In rare cases metastases are detected without an increase in PSA level.

[1193] The AOX1, C1orf114, GAS6, HAPLN3, ST6GALNAC3 and/or ZNF660 markers of the present invention may for example be used in combination with PSA measurements. Thus, the method for assisting in diagnosing and/or for diagnosing prostate cancer in an individual and/or for assisting in prognosing and/or for prognosing the disease progression of prostate cancer in an individual having developed prostate cancer and/or for assisting in predicting and/or for predicting the outcome of prostate cancer in an individual having developed prostate cancer and/or for assisting in monitoring and/or for monitoring the effect of treatment on prostate cancer progression in an individual having developed prostate cancer and being treated for said prostate cancer and/or for assisting in monitoring and/or for monitoring the progression of prostate cancer from a silent/indolent to an aggressive prostate cancer in an individual having developed prostate cancer and/or for assisting in determining and/or determining the treatment regime of an individual having developed prostate cancer may further comprise determining the PSA level.

[1194] It has been shown that hypomethylation of TFF3 and hypermethylation of SLC18A2 is indicative of the presence of prostate cancer (US 2010/0303795). Furthermore, a decrease in the transcriptional and/or translational level of SLC18A2, whereas an increase in transcriptional and/or translational level of TFF3 is indicative of the presence of prostate cancer.

[1195] Thus, the methods of the present invention may further comprise a step of determining the methylation degree and/or methylation incidence and/or translational level and/or transcriptional level of at least one of the genes selected from the group comprising TFF3 and SLC18A2.

[1196] The methods of the present invention may further comprise a step of determining the methylation degree and/or methylation incidence and/or translational level and/or transcriptional level of at least one of the genes selected from the group comprising KLF8 and MOB3B (previously known as MOBKL2B).

[1197] The methods of the present invention may further comprise a step of determining the methylation degree and/or methylation incidence and/or translational level and/or transcriptional level of at least one of the genes selected from the group comprising GABRE, TFF3, ZNF132, PCA3, GSTP1, PITX2 and SLC18A2.

### Computer Implemented Methods

[1198] In certain embodiments it is advantageous to perform the methods under the control of a computer. Thus in one aspect the invention concerns a system for predicting the prognosis of an individual with prostate cancer, comprising:
[1199] a) means for analysing the methylation level, transcriptional level, and/or translational expression levels of one or more biomarkers in a sample obtained from said individual, and
[1200] b) means for estimating the probability for a patient with prostate cancer of surviving for a certain period of time,
[1201] wherein said biomarker comprises one or more nucleotide sequences selected from the group consisting of:
[1202] I′) the nucleotide sequence of SEQ ID NO:1 (AOX1); or
[1203] I″) a nucleotide sequence being complementary to SEQ ID NO: 1; or
[1204] I″′) a nucleotide sequence having at least 90% sequence identity to any one of I′ or I″; or
[1205] I″″) a fragment of any one of I′, I″ or I″′, wherein the fragment comprises at least 15 consecutive nucleotides of any one of I′, I″ or I″′; and
[1206] II′) the nucleotide sequence of SEQ ID NO:2 (C1orf114); or
[1207] II″) a nucleotide sequence being complementary to SEQ ID NO: 2; or
[1208] II″′) a nucleotide sequence having at least 90% sequence identity to any one of II′ or II″; or
[1209] II″″) a fragment of any one of II′, II″ or II″′, wherein the fragment comprises at least 15 consecutive nucleotides of any one of I′, I″ or I″′; and
[1210] III′) the nucleotide sequence of SEQ ID NO:3 (GAS6); or
[1211] III″) a nucleotide sequence being complementary to SEQ ID NO: 3; or
[1212] III″′) a nucleotide sequence having at least 90% sequence identity to any one of III′ or III″′; or
[1213] III″″) a fragment of any one of III′, III″ or III″′, wherein the fragment comprises at least 15 consecutive nucleotides of any one of III′, III″ or III″′; and
[1214] IV′) the nucleotide sequence of SEQ ID NO:4 (HAPLN3); or
[1215] IV″) a nucleotide sequence being complementary to SEQ ID NO: 4; or
[1216] IV″′) a nucleotide sequence having at least 90% sequence identity to any one of IV′ or IV″; or
[1217] IV″″) a fragment of any one of IV′, IV″ or IV″′, wherein the fragment comprises at least 15 consecutive nucleotides of any one of IV′, IV″ or IV″′; and
[1218] V′) the nucleotide sequence of SEQ ID NO:5 (ST6GALNAC3 (SEQ IDNO:5)); or
[1219] V″) a nucleotide sequence being complementary to SEQ ID NO: 5; or
[1220] V″′) a nucleotide sequence having at least 90% sequence identity to any one of V′ or V″; or
[1221] V″″) a fragment of any one of V′, V″ or V″′, wherein the fragment comprises at least 15 consecutive nucleotides of any one of V′, V″ or V″′; and
[1222] VI′) the nucleotide sequence of SEQ ID NO:6 (ZNF660); or
[1223] VI″) a nucleotide sequence being complementary to SEQ ID NO: 6; or
[1224] VI″′) a nucleotide sequence having at least 90% sequence identity to any one of VI′ or VI″; or
[1225] VI″″) a fragment of any one of VI′, VI″ or VI″′, wherein the fragment comprises at least 15 consecutive nucleotides of any one of VI′, VI″ or VI″′.

[1226] In one aspect the invention concerns a computer program product having a computer readable medium, said computer program product providing a system for predicting the prognosis of an individual, said computer program product comprising means for carrying out any of the steps of any of the methods defined herein.

[1227] In one aspect the invention concerns a method for predicting a probability of recurrence of prostate cancer in a patient following radical prostatectomy, comprising: correlating a set of pre-operative factors for the patient to a functional representation of a set of pre-operative factors determined for each of a plurality of persons previously diagnosed with prostatic cancer and having been treated by radical prostatectomy, so as to yield a value for total points for the patient, which set of factors for each of a plurality of persons is correlated with the incidence of recurrence of prostatic cancer for each person in the plurality of persons, wherein the set of pre-operative factors comprises pre-treatment methylation level, transcriptional level, and/or translational expression levels of one or more genes selected from the group consisting of: C1orf114 (SEQ ID NO:2), HAPLN3 (SEQ ID NO:4), AOX1 (SEQ ID NO:1), GAS6 (SEQ ID NO:3), ST6GALNAC3 (SEQ ID NO:5) and ZNF660 (SEQ ID NO:6), and optionally one or more of pre-treatment PSA level, primary Gleason grade or secondary Gleason grade, wherein the functional representation comprises a scale for each of pre-treatment methylation level, transcriptional level, and/or translational expression levels of one or more genes selected from the group consisting of C1orf114 (SEQ ID NO:2), HAPLN3 (SEQ ID NO:4), AOX1 (SEQ ID NO:1), GAS6 (SEQ ID NO:3), ST6GALNAC3 (SEQ ID NO:5) and ZNF660 (SEQ ID NO:6), and optionally a scale for one or more of pre-treatment PSA level, primary Gleason grade or secondary Gleason grade, a points scale, a total points scale, and a predictor scale, wherein the scales for pre-treatment methylation level, transcriptional level, and/or translational expression levels of one or more genes selected from the group consisting of C1orf114 (SEQ ID NO:2), HAPLN3 (SEQ ID NO:4), AOX1 (SEQ ID NO:1), GAS6 (SEQ ID NO:3), ST6GALNAC3 (SEQ ID NO:5) and ZNF660 (SEQ ID NO:6), and optionally one or more of pre-treatment PSA level, primary Gleason grade or secondary Gleason grade, each have values on the scales which can be correlated with values on the points scale, and wherein the total points scale has values which may be correlated with values on the predictor scale; and b) correlating the value on the total points scale for the patient with a value on the predictor scale to predict the quantitative probability of recurrence of prostatic cancer in the patient following radical prostatectomy.

[1228] In one aspect the invention concerns an apparatus for predicting a probability of disease recurrence in a patient with prostate cancer following a radical prostatectomy, which apparatus comprises: a) a correlation of a set of pre-operative factors for each of a plurality of persons previously diagnosed with prostatic cancer and having been treated by radical prostatectomy with the incidence of recurrence of prostatic cancer for each person of the plurality of persons, wherein the set of pre-operative factors comprises pre-treatment methylation level, transcriptional level, and/or translational expression levels of one or more genes selected from the group consisting of C1orf114 (SEQ ID NO:2), HAPLN3 (SEQ ID NO:4), AOX1 (SEQ ID NO:1), GAS6 (SEQ ID NO:3), ST6GALNAC3 (SEQ ID NO:5) and ZNF660 (SEQ ID NO:6), and optionally one or more of pre-treatment PSA level, primary Gleason grade or secondary Gleason grade; and b) a means for comparing an identical set of pre-operative factors determined from a patient diagnosed as having prostate cancer to the correlation to predict the quantitative probability of recurrence of prostate cancer in the patient following radical prostatectomy.

[1229] As in the case of non-computer implemented methods, the methylation level is selected from methylation degree and/or methylation incidence.

### Kit

[1230] According to another aspect of the present invention, it provides a kit (assay) useful for detecting prostate cancer and various aspects of prostate cancer, e.g., using the methods disclosed herein.

[1231] In one embodiment the kit comprises means for determining the methylation level and/or methylation incidence of at least one gene selected from the group consisting of AOX1 (SEQ ID NO:1), C1orf114 (SEQ ID NO:2), GAS6 (SEQ ID NO:3), HAPLN3 (SEQ ID NO:4), ST6GALNAC3 (SEQ ID NO:5) and ZNF660 (SEQ ID NO:6) or nucleotide sequence having at least 90% sequence identity with a nucleotide sequence selected from the group consisting of SEQ ID NO:1, SEQ ID NO:2, SEQ ID NO:3, SEQ ID NO:4, SEQ ID NO:5 and SEQ ID NO:6, or part thereof.

[1232] In one embodiment, the present invention provides a kit, e.g., a compartmentalized carrier including a first container containing a pair of primers for amplification of a region of at least one gene selected from the group consisting of AOX1 (SEQ ID NO:1), C1orf114 (SEQ ID NO:2), GAS6 (SEQ ID NO:3), HAPLN3 (SEQ ID NO:4), ST6GALNAC3 (SEQ ID NO:5) and ZNF660 (SEQ ID NO:6), optionally a second container containing a pair of primers for amplification of a region in a reference gene, and a third container containing a first and second oligonucleotide probe specific for the amplification of the test gene and the region of the reference gene, respectively.

[1233] The region of at least one gene selected from the group consisting of AOX1 (SEQ ID NO:1), C1orf114 (SEQ ID NO:2), GAS6 (SEQ ID NO:3), HAPLN3 (SEQ ID NO:4), ST6GALNAC3 (SEQ ID NO:5) and ZNF660 (SEQ ID NO:6) comprises at least one CpG site of interest. In a preferred embodiment the at least one CpG site is comprised in the regions or gene sequences as defined in the section “Determining the methylation degree and the methylation incidence”.

[1234] In another embodiment, the kit provided by the present invention further includes a fourth container containing a modifying agent that modifies unmethylated cytosine to produce a converted nucleic acid, e.g., uracil. Any suitable modifying agent, such as an agent that modifies unmethylated cytosine nucleotides, can be included in the kit provided by the present invention. For example, the modifying agent can be sodium bisulfite.

[1235] The kit may also comprise additional reagents used in the amplifying step of the detection method as disclosed herein. Thus, the kit may further comprise deoxyribonucleoside triphosphates, DNA polymerase enzyme and/or nucleic acid amplification buffer.

[1236] The kit may in preferred embodiments further comprise instructions for the performance of the detection method of the kit and for the interpretation of the results. The kit involves the method of detecting the methylation status of a CpG-containing nucleic acid, wherein said CpG-containing nucleic acids is modified using an agent which modifies at least one unmethylated cytosine in said methylated CpG-containing nucleic acid and amplifying said CpG-containing nucleic acid by means of at least one methylation-independent oligonucleotide primer. The instructions for performing the method of the kit comprises for example information of particular annealing temperatures to be used for the at least one methylation-independent primers, as well as for example information on cycling parameters. The kit may further comprise instructions for the interpretation of the results obtained by the method. For example how to interpret the amplified products subsequently analysed by high resolution melting analysis or methods as described elsewhere herein. For example the kit in one embodiment comprises means for providing a methylation level and/or means for providing information as to determine whether the level of methylation is above or below a cut off value. However, the assay in another embodiment comprises means for providing a transcriptional and/or translational expression level, and/or means for providing information as to determine whether the level of expression is above or below a cut off value.

[1237] The kit may in preferred embodiments further comprise software comprising an algorithm for calculation of primer annealing temperature and interpretation of results.

[1238] In yet another embodiment, the kit provided by the present invention further includes a probe for PSA determination. In still another embodiment, the kit provided by the present invention further includes an instruction insert disclosing normal and/or abnormal methylation ratio ranges for the detection of neoplasia, describing the types of samples suitable or unsuitable for the application of the kit, and/or the specificity or sensitivity provided by the assays utilizing the kit of the present invention.

[1239] The present invention also provides a kit useful for detecting prostate adenocarcinoma, for example in body fluid samples. The kit includes a first container containing at least one pair of primers capable of distinguishing between methylated and unmethylated nucleic acid for amplification of a region of at least one gene selected from the group consisting of AOX1 (SEQ ID NO:1), C1orf114 (SEQ ID NO:2), GAS6 (SEQ ID NO:3), HAPLN3 (SEQ ID NO:4), ST6GALNAC3 (SEQ ID NO:5) and ZNF660 (SEQ ID NO:6) and an instruction insert disclosing, among other things, that the kit is useful for detecting prostate cancer in a body fluid sample of an individual and that a methylation level of the region of at least one gene selected from the group consisting of AOX1 (SEQ ID NO:1), C1orf114 (SEQ ID NO:2), GAS6 (SEQ ID NO:3), HAPLN3 (SEQ ID NO:4), ST6GALNAC3 (SEQ ID NO:5) and ZNF660 (SEQ ID NO:6) as determined by conventional or non-real-time PCR using the primers provided that is higher than the methylation level of said region in a normal subject is indicative of prostate cancer in the subject.

[1240] For example the kit in one embodiment comprises means for providing a methylation level and/or means for providing information as to determine whether the level of methylation is above or below a cut off value, and thus indicative of the presence or absence of prostate cancer, respectively.

[1241] The kit may comprise a plurality of oligonucleotides for use in determining the expression level of a panel of genes. Thus in one aspect the invention concerns use of a plurality of oligonucleotides for determining the expression level of a panel of genes, where said panel comprises two or more biomarkers selected from:
[1242] I′) the nucleotide sequence of SEQ ID NO:1 (AOX1); or
[1243] I″) a nucleotide sequence being complementary to SEQ ID NO: 1; or
[1244] I″′) a nucleotide sequence having at least 90% sequence identity to any one of I′ or I″; or
[1245] I″″) a fragment of any one of I′, I″ or I″′, wherein the fragment comprises at least 15 consecutive nucleotides of any one of I′, I″ or I″′; and
[1246] II′) the nucleotide sequence of SEQ ID NO:2 (C1orf114); or
[1247] II″) a nucleotide sequence being complementary to SEQ ID NO: 2; or
[1248] II″′) a nucleotide sequence having at least 90% sequence identity to any one of II′ or II″; or
[1249] II″″) a fragment of any one of II′, II″ or II″′, wherein the fragment comprises at least 15 consecutive nucleotides of any one of I′, I″ or I″′; and
[1250] III′) the nucleotide sequence of SEQ ID NO:3 (GAS6); or
[1251] III″) a nucleotide sequence being complementary to SEQ ID NO: 3; or
[1252] III″′) a nucleotide sequence having at least 90% sequence identity to any one of III′ or III″′; or
[1253] III″″) a fragment of any one of III′, III″ or III″′, wherein the fragment comprises at least 15 consecutive nucleotides of any one of III′, III″ or III″′; and
[1254] IV′) the nucleotide sequence of SEQ ID NO:4 (HAPLN3); or
[1255] IV″) a nucleotide sequence being complementary to SEQ ID NO: 4; or
[1256] IV″′) a nucleotide sequence having at least 90% sequence identity to any one of IV′ or IV″; or
[1257] IV″″) a fragment of any one of IV′, IV″ or IV″′, wherein the fragment comprises at least 15 consecutive nucleotides of any one of IV′, IV″ or IV″′; and
[1258] V′) the nucleotide sequence of SEQ ID NO:5 (ST6GALNAC3 (SEQ ID NO:5)); or
[1259] V″) a nucleotide sequence being complementary to SEQ ID NO: 5; or
[1260] V″′) a nucleotide sequence having at least 90% sequence identity to any one of V′ or V″; or
[1261] V″″) a fragment of any one of V′, V″ or V″′, wherein the fragment comprises at least 15 consecutive nucleotides of any one of V′, V″ or V″′; and
[1262] VI′) the nucleotide sequence of SEQ ID NO:6 (ZNF660); or
[1263] VI″) a nucleotide sequence being complementary to SEQ ID NO: 6; or
[1264] VI″′) a nucleotide sequence having at least 90% sequence identity to any one of VI′ or VI″; or
[1265] VI″″) a fragment of any one of VI′, VI″ or VI″′, wherein the fragment comprises at least 15 consecutive nucleotides of any one of VI′, VI″ or VI″′.

[1266] In one embodiment the oligonucleotides are for use in the manufacture of a diagnostic product for determining the prognosis or likelihood of recurrence of prostate cancer in an individual.

### EXAMPLES

### Materials and Methods

### Cell Lines

[1267] Human prostate cancer (PC) cell lines LNCaP, DU145 (obtained from American Type Culture Collection) and BPH1 (obtained from the German Collection of Microorganisms and Cell Cultures) were cultured in RPMI 1640 with L-glutamin (Gibco, Invitrogen) supplemented with 10% fetal bovine serum and 100 U/ml penicillin and 100 μg/ml streptomycin. Cell line identity was verified by STR analysis (IdentiCell).

### Patient Material

[1268] Samples used for 27K Infinium Analysis: Nine adjacent normal (ADJ-N) and five clinically localized PC (radical prostatectomies (RPs)) tissue samples were obtained by careful macrodissection of 20-μm sections of fresh-frozen tissue-tek-embedded prostate needle biopsies taken immediately after radical prostatectomy. Four samples of primary tumours from metastatic PCs were obtained from trans-urethral resection specimens of the prostate (TURP). Biopsy and TURP were performed by the Urology Department, Aarhus University Hospital, Denmark.

[1269] Samples used for bisulfite sequencing (BS): Five ADJ-N, ten RP and ten MPC samples were obtained as described above. Six benign prostatic hyperplasias (BPHs) samples were obtained from TURP specimens.

[1270] Cohort 1: Radical prostatectomy cohort consisting of 293 RP, 26 RP with endocrine treatment, 18 ADJ-N, 15 BPH, 11 high-grade prostate intraepithelial neoplasia (PIN), 17 MPC and 28 castrate refractory PC (CRPC) samples (clinicopathological data in table 5 and table 6). RP, ADJ-N and PIN samples originated from radical prostatectomy specimens. BPH, MPC and CRPC samples originated from TURP specimens. Radical prostatectomies/TURPs were performed from 1993-2005 at Aarhus University Hospital, Denmark and University Hospital Zurich, Switzerland. Cohort 1 was originally used for construction of TMAs, tissue collection and characterization is described in Sorensen et al., 2009 (Sorensen, K. D., et al., Genetic and epigenetic SLC18A2 silencing in prostate cancer is an independent adverse predictor of biochemical recurrence after radical prostatectomy, Clin Cancer Res, 2009, 15(4): p. 1400-10). For DNA purification, FFPE blocks were biopsied (1.5 mm) next to the original cores used for the TMAs. Samples of lymph node metastases and of patients having received pre- or postoperative therapy were excluded. We originally sampled 532 FFPE blocks, but upon DNA quality control 124 samples failed resulting in the final cohort.

[1271] Cohort 2 (validation): Radical prostatectomy cohort consisting of 114 RP samples (clinicopathological data in table 5). Radical prostatectomies were performed from 1993-2002 at Department of Urology, Heinrich Heine University, Duesseldorf, Germany and from 1992-2003 at Department of Urology, Tampere University Hospital, Finland. For German samples tissue collection and characterization is described in Florl et al., 2004 (Florl, A. R., et al., Coordinate hypermethylation at specific genes in prostate carcinoma precedes LINE-1 hypomethylation. Br J Cancer, 2004. 91(5): p. 985-94). Of the original German samples we analyzed a subset for which DNA and complete follow-up was available as described in Schulz, W. A., et al 2007 (Schulz, W. A., et al., Factor interaction analysis for chromosome 8 and DNA methylation alterations highlights innate immune response suppression and cytoskeletal changes in prostate cancer. Mol Cancer, 2007. 6: p. 14). For both German and Finnish samples, a trained pathologist dissected the prostate immediately after RP and tumor samples were snap-frozen. Based on H&E stained sections, DNA was extracted from fresh-frozen samples with >70% tumor content. We originally analyzed 117 samples, but upon DNA quality control 3 samples failed resulting in the final cohort.

### DNA Purification and Bisulfite Conversion

[1272] Genomic DNA used for Infinium analysis and for bisulfite sequencing (BS) was purified from tissue samples and cell lines using the Qiagen Gentra Puregene Blood Kit with proteinase K treatment (100 U, 30 min at 55° C.) and converted using the Qiagen EpiTecte kit. DNA from FFPE samples was purified as previously described (Sørensen, K. D., et al., Prognostic significance of aberrantly silenced ANPEP expression in prostate cancer. Br J Cancer, 2013. 108: p. 420), while cell line DNA used for qMSP was purified using the Macherey-Nagel Nucleospin kit and bisulfite converted using the EZ-96 DNA Methylation-Gold Kit™ from Zymo as described in manual.

[1273] For cohort 2, DNA extraction was conducted in Germany and Finland using the blood and cell culture DNA kit (Qiagen) (Florl, A. R., et al., Coordinate hypermethylation at specific genes in prostate carcinoma precedes LINE-1 hypomethylation. Br J Cancer, 2004. 91(5): p. 985-94), and the AllPrep Mini DNA/RNA kit (Qiagen), respectively.

### Infinium Methylation Analysis

[1274] A total of 1 μg DNA was bisulfite converted, whole genome amplified and applied to Illumina's Infinium 27k Human DNA methylation Beadchip v1.2. These analyses were conducted by AROS Applied Biotechnology A/S, Aarhus, Denmark.

### Bisulfite Sequencing

[1275] Bisulfite sequencing was performed as previously described in Abildgaard et al. 2011 and Vestergaard et al., 2010 (Abildgaard, M. O., et al., Downregulation of zinc finger protein 132 in prostate cancer is associated with aberrant promoter hypermethylation and poor prognosis. Int J Cancer, 2011; Vestergaard, E. M., et al., Promoter hypomethylation and upregulation of trefoil factors in prostate cancer. Int J Cancer, 2010. 127(8): p. 1857-65). Briefly: Primers (suppl table 2), designed using Methprimer (Li, L. C. and R. Dahiya, MethPrimer: designing primers for methylation PCRs. Bioinformatics, 2002. 18(11): p. 1427-31), were used to amplify bisulfite converted DNA. Gel purified PCR products were cloned using the TOPO® TA Cloning® Kit for Sequencing (Invitrogen). Several single colonies were picked, PCR amplified and sequenced. All sequences were manually inspected for C/T status of each CpG site. Results were visualized and analyzed in QUMA (Kumaki, Y., M. Oda, and M. Okano, QUMA: quantification tool for methylation analysis. Nucleic Acids Res, 2008. 36(Web Server issue): p. W170-5). Sequences with <95% bisulfite conversion were excluded from further analysis. For each gene in each sample the overall methylation frequency (methylated CpG sites/all CpG sites) as well as the methylation frequency of the most methylated sequence was calculated.

Methylation Specific qPCR (qMSP)

[1276] qMSP assays (suppl table 2) were designed using NetPrimer and Beacon Designer™ (Premier Biosoft) Primer3 (Rozen, S., Skaletsky, H. J., Primer3. Code available at http://www-genome.wi.mit.edu/genome_software/other/primer3.html) and PrimerquestSM (Integrated DNA Technologies) and were optimized on bisulfite converted CpGenome Universal Methylated and Unmethylated DNA (Millipore) using Taqman Universal Mastermix NO UNG. MYOD1 (reference gene) primer set was from (Jeronimo, C., et al., Quantitation of GSTP1 methylation in non-neoplastic prostatic tissue and organ-confined prostate adenocarcinoma. J Natl Cancer Inst, 2001. 93(22): p. 1747-52).

[1277] Patient DNA was analyzed in triplicate and cell line DNA was analyzed three times in duplicate using 5 ng bisulfite converted DNA per reaction. DNA and mastermix were pippeted using the Biomek 3000 robot (Beckman Coulter) and run on Applied Biosystem's 7900HT real-time thermal cycler in 384 well plates. Reaction conditions in suppl table 2. Bisulfite converted and un-converted methylated and un-methylated DNA and a standard curve of methylated DNA was included on each plate. Samples were excluded from further analysis if 2/3 MYOD1 Ct values exceeded 36. Outliers >2 Cts lower/higher than the other Ct values were removed prior to analysis. Samples were considered negative for methylation if ≧2 reactions failed.

### 5-Aza-dC Treatment, RNA Extraction, and RT-qPCR

[1278] BPH1, PNT1A, LNCaP, 22rv1, PC3 and DU145 cell lines at >50% confluence were treated with 1 μM freshly prepared 5-aza-2′-deoxycytidine (5-aza-dC) in 50% acetic acid (Sigma, cat. no.: A3656) for two days. After a five day recovery period, DNA was purified as described above. RNA was purified using the RNeasy Mini kit from Qiagen and stored at −80° C. One μg RNA was reverse transcribed using 100 pmol oligo-dT(24) primer and the SuperScript II Reverse Transcriptase kit (Invitrogen). Taqman® gene expression assays: AOX1 (Hs01565232_ml), C1orf114 (Hs00982321_g1), GAS6 (Hs01090305_ml), and HAPLN3 (Hs00820260_ml) were used with Taqman Mastermix no UNG. UBC was used for normalization (primers: 5′-GATTTGGGTCGCGGTTCTT-3′ and 5′-TGCCTTGACATTCTCGATGGT-3′ used with Power Sybr Green Mastermix). Assays were run twice in triplicate in 10 μL reactions. Reactions were mixed and run as described for qMSP assays.

### Chromatin Immunoprecipitation (ChIP)

[1279] ChIP was performed using the MAGnify™ Chromatin Immunoprecipitation System (Invitrogen) as described by the manufacturer. 3×106 cells were seeded, and after two days crosslinked directly in the flasks or dishes with 1% formaldehyde (Calbiochem), harvested and stored at −80° C. To shear the chromatin to 100-500 bp fragments, cell samples were transferred to microTUBEs (Covaris®) and fragmented on the Covaris® S2 system (settings: Duty cycle: 20%; Cycles per burst: 200; Intensity: 5; Time: 300 sec; Temperature (water bath): 4° C.; Power mode: Frequency sweeping; Degassing mode: continuous). Two μl were withdrawn, Proteinase K-treated and run (5 μl of a 1:10 dilution) on a 2% agarose gel to verify fragment sizes. Sheared chromatin was saved as aliquots in the −80° C. freezer. The immunoprecipitation was performed three independent times with three antibodies per cell line: 1 μl unspecific rabbit IgG antibody provided in the kit, 1 μl H3K4me3-specific antibody (Ab8580, Abcam), 5 μl H3K27me3-specific antibody (M07-449, Millipore). Incubation between antibody-bound beads and chromatin extract was performed o/n at 4° C. Purified DNA was stored at −20° C. Primers (Table 15) for quantification of histone trimethylations at candidate genes, GAPDH and COL2A1 (positive controls for H3K4me3 and H3K27me3, respectively) were designed using Primer3 (Rozen, S., Skaletsky, H. J., Primer3. Code available at http://www-genome.wi.mit.edu/genome_software/other/primer3.html). Reactions were pippeted and run as described for qMSP assays. Each reaction was run in triplicate on 2 μl IP'ed or input DNA (10× dilutions compared to the IP'ed samples). No-template controls and standard curves based on DU145 cell line DNA independent of the three ChIP experiments were included on each plate. Outliers >1 Ct lower/higher than the other Ct values were removed prior to analysis, except for samples IP'ed with unspecific rabbit IgG antibody (where all were included). The fraction of input DNA bound by specific antibodies was calculated for each ChIP experiment: (average DNA quantity in IP'ed sample)/(average DNA quantity in input sample)*100%. The fraction of input DNA immunoprecipitated by unspecific rabbit IgG antibody was ≦0.16%.

### Statistical Analysis

[1280] Unless otherwise stated, all statistical analyses were conducted in Stata version 10.1. Analysis of 27K Infinium data: Cluster analysis including CpG sites with a variance >0.03 was performed in the Illumina software GenomeStudio® using the correlation algorithm. Statistical significance of differential methylation between ADJ-N and PC samples was tested with a Mann-Whitney U test using R (http://www.r-project.org/). Δβ=|mean β PC samples−mean β ADJ-N samples|. Xβ=mean β PC samples/mean β ADJ-N samples. Prior to calculation of significance, Δβ and Xβ the largest and smallest β-value from each of the groups were removed as previously described (Oster, B., et al., Identification and validation of highly frequent CpG island hypermethylation in colorectal adenomas and carcinomas. Int J Cancer, 2011).

[1281] Receiver operated characteristics (ROC) analysis was performed on ADJ-N and BPH versus RP samples. Survival analysis was conducted using PSA recurrence as endpoint. In cohort 1, RP samples were divided into high and low methylation groups for each marker based on ROC analysis of recurrence/no recurrence data within 48 months of surgery; Individual markers, as well as all available clinicopathological parameters (pre-operative PSA, Gleason sum, T-stage and free resection margins), were analyzed by uni- or multivariate cox regression analysis. Combinations of markers (as described in text) were tested by uni- or multivariate cox regression analysis. For all analyses, hazard ratios (HRs) were reported with 95% confidence intervals and P-values. To evaluate the prognostic strength of candidate methylation biomarkers when combined with clinicopathological variables, we calculated a weighted sum of variables included in multivariate models. Each variable was weighed by the estimated regression coefficients in the proportional-hazards model. Areas under the curves (AUCs) for single variables and weighted sums were calculated using recurrence/non-recurrence status at 36 months follow-up. For Kaplan-Meier plots P-values of log rank tests were reported. Where appropriate, correction for multiple testing was conducted according to Hochberg (Hochberg, Y. A sharper bonferroni procedure for multiple tests of significance. Biometrika, 1988. 75: p. 800).

### Example 1

### Identification of Biomarkers for Prostate Cancer

### Infinium Screening of Single CpG Site Methylation Levels

[1282] Using Illumina's Infinium 27K Methylation Assay, 27,578 CpG sites were assayed for methylation in DNA from nine adjacent normal (ADJ-N), five clinically localized PCs (RPs) and four primary PC samples from patients with metastases (MPCs). In addition, the three prostatic cell lines BPH-1, LNCaP and DU145 were analyzed. Each CpG site was assigned a β-value ranging from 0 (un-methylated) to 1 (fully methylated). Unsupervised clustering analysis, based on the most variably methylated CpG sites across patient samples (variance>0.03, 932 CpG sites) clearly separated non-malignant and PC samples (FIG. 1A). Thus, all ADJ-N samples clustered together. Two RP samples resembled the ADJ-N samples, whereas the remaining RP and MPC samples formed a separate cluster. The intermixture of RP and MPC samples suggested that the overall cancer-specific methylation pattern is established early in cancer development.

[1283] A total of 3,666 CpG sites covering 2,991 genes were significantly differentially methylated between PC and ADJ-N samples (P<0.01, Mann-Whitney U test). Of these, 413 CpG sites covering 345 genes displayed a Δβ of more than 0.3 (Table 2). The majority of the 345 genes were hypermethylated in PC (300/345, 87%) with most of the CpG sites located within CpG islands (270/300, 90%), CpG sites of hypomethylated genes were predominantly located outside CpG islands (FIG. 3).

### Selection of Candidate Genes

[1284] We identified six cancer specific hypermethylated genes as novel DNA methylation markers for PC, namely AOX1, C1orf114, GAS6, HAPLN3, ST6GALNAC3 and ZNF660 (Table 2, FIG. 1B). Candidate gene selection was based on i) difference in methylation levels between ADJ-N and PC sample groups (Δβ), ii) fold change in methylation levels between ADJ-N and PC sample groups (Xβ), and, when possible, iii) presence of >1 CpG site indicating cancer associated hypermethylation. We preferably included genes not previously investigated in relation to PC.

### Example 2

### Validation of the Identified Biomarkers

[1285] The accuracy of the β-values for the six candidate genes was confirmed by bisulfite sequencing (BS) of DNA from the three cell lines included in the Infinium analysis (FIG. 4 and FIG. 5). The observed cancer-specific hypermethylation in patient samples was further validated in 31 independent non-malignant and PC samples by BS (FIG. 1B, table 3 and FIG. 6). For all six genes, methylation frequencies were significantly higher in PC samples than in non-malignant samples, confirming Infinium analysis results. ADJ-N and BPH samples did not differ significantly, nor did RP and MPC samples (FIG. 1B). PC samples often contained individual heavily methylated sequences in which most CpG sites were methylated, whereas the non-malignant samples rarely contained sequences with stretches of methylated CpG sites (FIG. 1B and FIG. 6). ST6GALNAC3 and ZNF660 contained highly methylated sequences in non-malignant samples (FIG. 1B).

[1286] Four candidates: AOX1, C1orf114, GAS6 and HAPLN3 were further investigated. For large-scale evaluation of methylation levels, we designed qMSP assays targeting methylated alleles of each gene (FIG. 4 and FIG. 5). qMSP assays clearly discriminated fully methylated DNA from heterogeneously methylated and un-methylated DNA in the cell lines BPH-1, LNCaP and DU145 (FIG. 5).

### Example 3

### Diagnostic Potential of the Biomarkers

### Epigenetic Characterization of Candidate Genes

[1287] In publicly available clinical gene expression datasets (Oncomine.org) AOX1 and GAS6 were down-regulated in PC in multiple studies and C1orf114 in one study (Table 4), suggesting, that these genes may be repressed by cancer-specific DNA hypermethylation in patient samples, whereas HAPLN3 is not.

[1288] Gene expression is regulated by interplay of histone modifications and DNA methylation. To investigate the regulation of the candidate genes in more detail, we analyzed six prostatic cell lines for DNA methylation and RNA expression, as well as for histone H3 lysine 4 trimethylation (H3K4me3) and histone H3 lysine 27 trimethylation (H3K27me3), which are associated with active and silenced gene expression, respectively.

[1289] BPH-1 and PNT1A cell lines are both derived from benign tissues, whereas PC3, DU145, LNCaP and 22rv1 cell lines are all derived from PCs. Three out of four candidate genes were expressed in BPH-1, PNT1A or both, and were frequently bivalently marked by H3K4me3/H3K27me3 when expressed (e.g. C1orf114 FIG. 10 and suppl FIG. 5). AOX1 was hypermethylated in all cell lines (FIG. 10). In the PC cell lines, RNA expression and epigenetic marks varied. Each gene was characterized by DNA hypermethylation, gene repression and absence of H3K4me3 in at least one PC cell line (FIG. 10), consistent with an epigenetic silencing mechanism. Furthermore, the H3K27me3 mark often accompanied DNA methylation and gene repression (e.g. C1orf114 FIG. 10 and FIG. 10).

[1290] Interestingly, the DNA demethylating drug 5-aza-dC generally stimulated RNA expression from DNA hypermethylated genes when methylation was reduced, but not when DNA methylation levels were unaffected by 5-aza-dC treatment (e.g. C1orf114 FIG. 10 and GAS6 FIG. 10), suggesting that DNA hypermethylation is important for gene repression.

[1291] Thus, compiled data suggest that the candidate genes adhere to the established pattern of gene specific DNA hypermethylation of H3K27me3 marked genes in cancer, and that the DNA hypermethylation likely results in reduced expression levels for all candidate genes in cell lines and for four genes in patient samples.

qMSP Based Large Scale Validation of Cancer-Specific Hypermethylation

[1292] The methylation levels of the candidate genes were evaluated by qMSP in two independent radical prostatectomy cohorts. First, methylation of the potential markers was tested in cohort 1 consisting of 293 RP samples as well as 18 ADJ-Ns, 15 BPHs, 11 prostatic intraepithelial neoplasias (PINs), 28 castrate refractory PCs (CRPCs) and 17 MPCs. Clinicopathological data for cohort 1 are summarized in table 5 and table 6.

[1293] The methylation levels of all 4 candidates were significantly lower in ADJ-N, BPH and PIN samples than in the clinically localized cancer (RP) samples (Mann-Whitney U test, P<0.05) (FIG. 7). RP, MPC and CRPC methylation levels were generally highly similar, although C1orf114 methylation levels in MPCs, exceeded the methylation levels in RPs (FIG. 7).

[1294] To evaluate the cancer-specificity of the candidate hypermethylation markers, we compared pooled benign samples (ADJ-N and BPH) to RP samples. RP samples were significantly more methylated than benign samples (FIG. 2, Mann-Whitney U test: P<0.0001 for each gene). In ROC analysis, areas under the curves (AUCs) based on benign and RP samples ranged from 0.89 (C1 orf114) to 0.98 (GAS6) (FIG. 2A-G). Optimizing specificity to 97% for all markers resulted in sensitivities of 71% (AOX1 and HAPLN3)—93% (GAS6) (Table 4), demonstrating very high cancer-specificity of the markers and indicating promising diagnostic potential.

### Example 3

### Prognostic Potential of the Biomarkers

[1295] We investigated the relationship between methylation, clinicopathological variables and recurrence free survival in the 293 RP samples in cohort 1. For validation we used an independent radical prostatectomy cohort comprised of samples from Germany and Finland including 114 DNA samples purified from fresh-frozen PC samples (cohort 2, Table 5).

[1296] None of the markers were significantly associated with age, but for several markers, hypermethylation was positively correlated with high Gleason score, high T-stage and/or high pre-operative PSA levels in one or both cohorts (Table 7, FIG. 11).

### Survival Analysis: ROC Based Model

[1297] Using gene methylation as continuous variables in univariate cox regression analysis of time to PSA recurrence, AOX1, C1orf114, HAPLN3, and KLF8 were significant in cohort 1 (training cohort) (P<0.05); C1orf114 and KLF8 remained significant after adjustment for multiple testing (Table 8). C1 orf114 was also significant in multivariate analysis including all clinicopathological parameters (Table 9). The prognostic value of C1orf114 in multivariate analysis was successfully validated in cohort 2 (Table 9). Thus, C1orf114 was a significant independent predictor of PSA recurrence after RP in two cohorts. Of note, the prognostic value of KLF8 in univariate analysis was also validated in cohort 2 (Table 10). AUCs of weighted sums of all clinicopathological variables, excluding lymph node status which was not significant in multivariate analysis, increased from 0.824 to 0.845 in cohort 1, and from 0.863 to 0.875 in cohort 2 by addition of C1orf114, suggesting improved model performance (Table 9). Excluding margin status (not significant in univariate analysis in cohort 2), gave similar results in both cohorts.

[1298] When applied clinically, biomarkers are often dichotomized (e.g. PSA and PCA3) facilitating unambiguous interpretation of test results. Using cohort 1 for training, we dichotomized AOX1, C1orf114, HAPLN3, and KLF8 into high/low methylation groups based on ROC analyses of recurrence status. All four dichotomized markers were significant in univariate cox regression analysis and log rank tests, while only C1orf114 remained significant in multivariate analysis (FIG. 3A, Table 11). We used cohort 2 for validation, and dichotomized patients based on the cut-off (fraction) defined in cohort 1. C1 orf114 (dichotomized) was significant in univariate as well as multivariate analysis in cohort 2. By single-gene analysis, none of the other three markers were significant as dichotomized variables in cohort 2 (FIG. 3B, Table 12).

[1299] PC is an (epi)genetically heterogeneous disease, and combinations of markers are likely to perform better than single markers. We therefore tested whether including additional markers in dichotomized models could improve the prognostic accuracy. We investigated all combinations of dichotomized AOX1, C1orf114, HAPLN3, and KLF8 in cohort 1. Five of eleven multi-gene models were significant (corrected P<0.05) in multivariate cox regression analysis including all clinicopathological parameters (Table 13). The best two-gene (C1orf114/HAPLN3) and the best three-gene (AOX1/C1orf114/HAPLN3) model were successfully validated in cohort 2 as significant predictors of biochemical recurrence in multivariate analysis (Table 9, FIG. 4, Table 14). In cohort 2, C1orf114/HAPLN3 and AOX1/C1orf114/HAPLN3 both performed markedly better than C1 orf114 alone, and AOX1/C1orf114/HAPLN3 performed slightly better than C1orf114/HAPLN3, suggesting that incorporation of a few genes into a simple dichotomized methylation-based test can improve robustness compared to a single-marker test. The fraction of patients classified as highly methylated by dichotomized C1orf114 alone (29%) increased to 38% and 42% in cohort 1, and to 34% and 37% in cohort 2, in the C1orf114/HAPLN3 and AOX1/C1orf114/HAPLN3 model, respectively. In multivariate analysis, hazard ratios (HRs) of the AOX1/C1orf114/HAPLN3 model reached 1.91 (1.26-2.90) (cohort 1) and 2.33 (1.31-4.13) (cohort 2) (Table 9). Three years post-surgery, 52% and 41% of patients in the high methylation group had experienced biochemical recurrence, compared to only 19% and 14% of patients in the low methylation group in cohorts 1 and 2, respectively. AUCs of weighted sums of all clinicopathological variables increased from 0.824 to 0.836 in cohort 1, and from 0.863 to 0.869 in cohort 2 bp addition of the AOX1/C1orf114/HAPLN3 methylation signature, suggesting moderately improved model performance. Excluding margin status gave similar results in both cohorts (Table 9).

### Example 4

### Combinations of Markers

[1300] Methylation markers may be combined into multi-gene panels for both diagnostic (Table 16) and prognostic use (Table 17). PC is an (epi)genetically heterogeneous disease, and combinations of markers are likely to perform better than single markers (Prensner et al.: Beyond PSA: The next generation of prostate cancer biomarkers. 2012. 4(127): 127rv3). Furthermore, the use of marker panels may alleviate loss of statistical power when markers are dichotomized (see e.g. example 3).

TABLE 1
413 CpG sites differentially methylated between ADJ-N and PC samples with
a Δβ of more than 0.3.

| | GENE | | | | CPG | Mean β | Mean | | |
|---|---|---|---|---|---|---|---|---|---|
| SYMBOL | ID | CpG site | MAPINFO | CHR | ISLAND | ADJ-N | β PC | Δβ | Xβ |
| ABCA3 | 21 | cg00949442 | 2331829 | 16 | TRUE | 0.18 | 0.63 | 0.45 | 3.44 |
| ABHD9 | 79852 | cg05488632 | 15204174 | 19 | TRUE | 0.15 | 0.54 | 0.39 | 3.57 |
| ACOT11 | 26027 | cg10266490 | 54786297 | 1 | FALSE | 0.17 | 0.48 | 0.31 | 2.80 |
| ACSM1 | 116285 | cg16940935 | 20609929 | 16 | FALSE | 0.86 | 0.55 | 0.31 | 0.64 |
| ACTA1 | 58 | cg13547644 | 227636231 | 1 | TRUE | 0.12 | 0.50 | 0.38 | 4.20 |
| ADCY4 | 196883 | cg16761581 | 23873647 | 14 | TRUE | 0.09 | 0.56 | 0.47 | 6.39 |
| ADCY4 | 196883 | cg12265829 | 23873862 | 14 | TRUE | 0.12 | 0.58 | 0.46 | 4.86 |
| AKR1B1 | 231 | cg18416881 | 133794363 | 7 | TRUE | 0.02 | 0.52 | 0.50 | 22.52 |
| AKR1B1 | 231 | cg13801416 | 133794459 | 7 | TRUE | 0.03 | 0.61 | 0.59 | 22.10 |
| ALDH1L1 | 10840 | cg16312163 | 127382091 | 3 | TRUE | 0.06 | 0.44 | 0.38 | 7.34 |
| ALDH1L1 | 10840 | cg07800320 | 127382257 | 3 | TRUE | 0.04 | 0.39 | 0.35 | 10.84 |
| ALOX12 | 239 | cg03760483 | 6840021 | 17 | TRUE | 0.24 | 0.58 | 0.35 | 2.45 |
| ALOX15 | 246 | cg09872233 | 4491674 | 17 | TRUE | 0.05 | 0.52 | 0.48 | 11.48 |
| ALOX15 | 246 | cg15843823 | 4491713 | 17 | TRUE | 0.08 | 0.55 | 0.47 | 6.92 |
| ALX4 | 60529 | cg00061629 | 44281834 | 11 | TRUE | 0.30 | 0.72 | 0.42 | 2.40 |
| ALX4 | 60529 | cg19358442 | 44282263 | 11 | TRUE | 0.16 | 0.50 | 0.35 | 3.22 |
| ALX4 | 60529 | cg04549333 | 44282399 | 11 | TRUE | 0.13 | 0.45 | 0.32 | 3.46 |
| ALX4 | 60529 | cg14144305 | 44282536 | 11 | TRUE | 0.14 | 0.45 | 0.31 | 3.22 |
| ALX4 | 60529 | cg08993172 | 44283843 | 11 | TRUE | 0.15 | 0.45 | 0.30 | 3.02 |
| ALX4 | 60529 | cg04970352 | 44283975 | 11 | TRUE | 0.26 | 0.70 | 0.43 | 2.63 |
| ALX4 | 60529 | cg08914623 | 44284148 | 11 | TRUE | 0.19 | 0.50 | 0.30 | 2.58 |
| AMT | 275 | cg20191453 | 49434859 | 3 | TRUE | 0.31 | 0.65 | 0.34 | 2.09 |
| ANGPTL2 | 23452 | cg09427311 | 128925551 | 9 | FALSE | 0.19 | 0.54 | 0.34 | 2.77 |
| AOX1 | 316 | cg02144933 | 201158935 | 2 | TRUE | 0.05 | 0.57 | 0.51 | 11.05 |
| AOX1 | 316 | cg12627583 | 201158976 | 2 | TRUE | 0.06 | 0.55 | 0.49 | 9.86 |
| APC | 324 | cg16970232 | 112101332 | 5 | TRUE | 0.09 | 0.54 | 0.46 | 6.27 |
| APC | 324 | cg20311501 | 112101401 | 5 | TRUE | 0.10 | 0.42 | 0.31 | 4.10 |
| APC | 324 | cg21634602 | 112101469 | 5 | TRUE | 0.04 | 0.45 | 0.41 | 11.78 |
| APC | 324 | cg15020645 | 112101668 | 5 | FALSE | 0.11 | 0.43 | 0.33 | 4.07 |
| APOBEC3C | 27350 | cg07186138 | 37740342 | 22 | FALSE | 0.10 | 0.47 | 0.37 | 4.71 |
| APOBEC3G | 60489 | cg26022401 | 37803334 | 22 | FALSE | 0.12 | 0.45 | 0.33 | 3.79 |
| ARX | 170302 | cg25053900 | 24943811 | X | TRUE | 0.21 | 0.60 | 0.39 | 2.80 |
| ATXN3 | 4287 | cg02028524 | 91643163 | 14 | TRUE | 0.86 | 0.47 | 0.38 | 0.55 |
| B3GALT7 | 374907 | cg20557104 | 46626153 | 19 | FALSE | 0.12 | 0.57 | 0.45 | 4.70 |
| BAIAP3 | 8938 | cg18282543 | 1324683 | 16 | TRUE | 0.11 | 0.46 | 0.36 | 4.34 |
| BCL2 | 596 | cg21602520 | 59136360 | 18 | TRUE | 0.14 | 0.47 | 0.33 | 3.40 |
| BHMT | 635 | cg10660256 | 78443439 | 5 | TRUE | 0.25 | 0.62 | 0.37 | 2.45 |
| BIK | 638 | cg26453588 | 41835965 | 22 | TRUE | 0.28 | 0.59 | 0.31 | 2.13 |
| BNC1 | 646 | cg10398682 | 81743023 | 15 | TRUE | 0.16 | 0.46 | 0.30 | 2.90 |
| BRDG1 | 26228 | cg04398282 | 68106851 | 4 | FALSE | 0.69 | 0.39 | 0.30 | 0.56 |
| BTG4 | 54766 | cg22879515 | 110888725 | 11 | TRUE | 0.24 | 0.62 | 0.38 | 2.60 |
| C10orf82 | 143379 | cg07621046 | 118419648 | 10 | TRUE | 0.27 | 0.62 | 0.35 | 2.26 |
| C12orf34 | 84915 | cg01335367 | 108656591 | 12 | FALSE | 0.30 | 0.62 | 0.32 | 2.09 |
| C1orf114 | 57821 | cg13958426 | 167663261 | 1 | TRUE | 0.06 | 0.47 | 0.41 | 7.99 |
| C1orf114 | 57821 | cg08047907 | 167663482 | 1 | TRUE | 0.08 | 0.51 | 0.43 | 6.65 |
| C1orf158 | 93190 | cg18839416 | 12728436 | 1 | FALSE | 0.66 | 0.35 | 0.31 | 0.53 |
| C1orf87 | 127795 | cg09851465 | 60312259 | 1 | TRUE | 0.23 | 0.59 | 0.36 | 2.59 |
| C1QTNF1 | 114897 | cg24844534 | 74531862 | 17 | TRUE | 0.03 | 0.34 | 0.31 | 11.63 |
| C21orf124 | 85006 | cg23178308 | 43973307 | 21 | TRUE | 0.23 | 0.55 | 0.33 | 2.43 |
| C5orf4 | 10826 | cg10257049 | 154210501 | 5 | FALSE | 0.16 | 0.50 | 0.34 | 3.13 |
| CART | 9607 | cg23300372 | 71051188 | 5 | TRUE | 0.05 | 0.58 | 0.53 | 10.66 |
| CCDC3 | 83643 | cg22750254 | 13083427 | 10 | TRUE | 0.10 | 0.44 | 0.34 | 4.29 |
| CCK | 885 | cg03724463 | 42281528 | 3 | TRUE | 0.15 | 0.48 | 0.33 | 3.27 |
| CD300E | 342510 | cg04995095 | 70131151 | 17 | FALSE | 0.67 | 0.36 | 0.31 | 0.53 |
| CD38 | 952 | cg26043257 | 15389336 | 4 | TRUE | 0.14 | 0.63 | 0.49 | 4.48 |
| CD5L | 922 | cg01637734 | 156077927 | 1 | FALSE | 0.63 | 0.33 | 0.31 | 0.52 |
| CD84 | 8832 | cg16776350 | 158815782 | 1 | FALSE | 0.60 | 0.28 | 0.31 | 0.48 |
| CDH5 | 1003 | cg22319147 | 64958100 | 16 | FALSE | 0.31 | 0.63 | 0.32 | 2.02 |
| CDH8 | 1006 | cg11323198 | 60627307 | 16 | TRUE | 0.10 | 0.44 | 0.33 | 4.24 |
| CDKN2A | 1029 | cg09099744 | 21958372 | 9 | TRUE | 0.13 | 0.55 | 0.42 | 4.39 |
| CDKN2B | 1030 | cg10210238 | 21995995 | 9 | TRUE | 0.30 | 0.63 | 0.34 | 2.13 |
| CDO1 | 1036 | cg12880658 | 115180285 | 5 | TRUE | 0.08 | 0.44 | 0.36 | 5.58 |
| CFHR1 | 3078 | cg12687463 | 195054473 | 1 | FALSE | 0.66 | 0.30 | 0.36 | 0.46 |
| CFHR2 | 3080 | cg09551916 | 195178511 | 1 | FALSE | 0.66 | 0.32 | 0.33 | 0.49 |
| CHAD | 1101 | cg06958829 | 45901117 | 17 | TRUE | 0.35 | 0.67 | 0.32 | 1.93 |
| CHAD | 1101 | cg06818777 | 45901619 | 17 | TRUE | 0.19 | 0.49 | 0.31 | 2.67 |
| CHODL | 140578 | cg24130010 | 18539047 | 21 | TRUE | 0.12 | 0.43 | 0.31 | 3.69 |
| CHX10 | 338917 | cg11525285 | 73776089 | 14 | TRUE | 0.13 | 0.48 | 0.35 | 3.74 |
| CMTM2 | 146225 | cg01683883 | 65170554 | 16 | TRUE | 0.34 | 0.67 | 0.33 | 1.97 |
| CNGA2 | 1260 | cg04613080 | 150653867 | X | FALSE | 0.57 | 0.25 | 0.32 | 0.44 |
| CNGA2 | 1260 | cg17032587 | 150653903 | X | FALSE | 0.70 | 0.29 | 0.41 | 0.41 |
| COL6A1 | 1291 | cg25020459 | 46226572 | 21 | TRUE | 0.04 | 0.43 | 0.38 | 9.78 |
| COL7A1 | 1294 | cg11846236 | 48607572 | 3 | TRUE | 0.06 | 0.48 | 0.42 | 7.94 |
| CPA1 | 1357 | cg15154229 | 129807247 | 7 | FALSE | 0.35 | 0.65 | 0.30 | 1.87 |
| CPLX2 | 10814 | cg19885761 | 175156252 | 5 | TRUE | 0.10 | 0.44 | 0.34 | 4.50 |
| CPVL | 54504 | cg24448259 | 29152635 | 7 | TRUE | 0.04 | 0.34 | 0.30 | 8.96 |
| CTTNBP2 | 83992 | cg27603796 | 117300039 | 7 | TRUE | 0.06 | 0.43 | 0.37 | 7.63 |
| CXCL14 | 9547 | cg18995088 | 134942633 | 5 | TRUE | 0.03 | 0.42 | 0.39 | 15.57 |
| CYBA | 1535 | cg26537639 | 87244875 | 16 | TRUE | 0.13 | 0.61 | 0.49 | 4.78 |
| CYBA | 1535 | cg19790294 | 87245256 | 16 | FALSE | 0.09 | 0.46 | 0.37 | 5.04 |
| CYP24A1 | 1591 | cg18956481 | 52223546 | 20 | TRUE | 0.07 | 0.47 | 0.40 | 6.60 |
| CYP27A1 | 1593 | cg03460682 | 219354560 | 2 | TRUE | 0.05 | 0.37 | 0.33 | 7.82 |
| CYP2W1 | 54905 | cg15914863 | 989201 | 7 | FALSE | 0.45 | 0.76 | 0.31 | 1.70 |
| DAB1 | 1600 | cg00848728 | 58488606 | 1 | TRUE | 0.04 | 0.43 | 0.39 | 10.74 |
| DARC | 2532 | cg18552413 | 157441234 | 1 | FALSE | 0.62 | 0.29 | 0.33 | 0.46 |
| DCC | 1630 | cg01839464 | 48122475 | 18 | TRUE | 0.07 | 0.40 | 0.33 | 5.68 |
| DEFB118 | 117285 | cg20312687 | 29420246 | 20 | FALSE | 0.72 | 0.39 | 0.33 | 0.54 |
| DES | 1674 | cg18182399 | 219991419 | 2 | TRUE | 0.15 | 0.46 | 0.31 | 3.12 |
| DGKI | 9162 | cg06277657 | 137182914 | 7 | TRUE | 0.27 | 0.57 | 0.31 | 2.15 |
| DGKZ | 8525 | cg18765542 | 46310677 | 11 | TRUE | 0.17 | 0.56 | 0.39 | 3.33 |
| DKK1 | 22943 | cg07684796 | 53744215 | 10 | TRUE | 0.07 | 0.39 | 0.31 | 5.45 |
| DPYS | 1807 | cg10303487 | 105548234 | 8 | TRUE | 0.10 | 0.53 | 0.43 | 5.52 |
| DUSP15 | 128853 | cg03513363 | 29922406 | 20 | TRUE | 0.14 | 0.47 | 0.32 | 3.23 |
| DYDC1 | 143241 | cg18396533 | 82106188 | 10 | TRUE | 0.16 | 0.53 | 0.37 | 3.35 |
| ECHDC3 | 79746 | cg24428042 | 11824414 | 10 | TRUE | 0.06 | 0.38 | 0.32 | 6.45 |
| EDG2 | 1902 | cg14563260 | 112841141 | 9 | TRUE | 0.07 | 0.52 | 0.45 | 7.65 |
| EDG3 | 1903 | cg11594137 | 90795801 | 9 | TRUE | 0.17 | 0.54 | 0.36 | 3.09 |
| EDG3 | 1903 | cg20083676 | 90795819 | 9 | TRUE | 0.25 | 0.67 | 0.42 | 2.67 |
| EDIL3 | 10085 | cg16773899 | 83716082 | 5 | TRUE | 0.07 | 0.41 | 0.34 | 5.74 |
| EFEMP1 | 2202 | cg20786074 | 56003759 | 2 | TRUE | 0.22 | 0.58 | 0.36 | 2.63 |
| EFS | 10278 | cg07197059 | 22905852 | 14 | TRUE | 0.28 | 0.59 | 0.31 | 2.13 |
| EGFL6 | 25975 | cg00932276 | 13497897 | X | TRUE | 0.05 | 0.55 | 0.50 | 11.11 |
| EIF1B | 10289 | cg04848452 | 40325805 | 3 | TRUE | 0.10 | 0.41 | 0.31 | 4.27 |
| EIF5A2 | 56648 | cg10541755 | 172108566 | 3 | TRUE | 0.07 | 0.40 | 0.33 | 5.59 |
| ELF4 | 2000 | cg06428055 | 129071553 | X | TRUE | 0.09 | 0.56 | 0.47 | 6.16 |
| EOMES | 8320 | cg15540820 | 27740287 | 3 | TRUE | 0.15 | 0.46 | 0.31 | 3.15 |
| EPB41L3 | 23136 | cg00027083 | 5533801 | 18 | TRUE | 0.15 | 0.61 | 0.47 | 4.21 |
| EPHA2 | 1969 | cg15146752 | 16355354 | 1 | TRUE | 0.25 | 0.58 | 0.33 | 2.34 |
| EPO | 2056 | cg08575537 | 100156562 | 7 | TRUE | 0.14 | 0.51 | 0.37 | 3.57 |
| EPSTI1 | 94240 | cg14539231 | 42464262 | 13 | TRUE | 0.05 | 0.50 | 0.45 | 9.97 |
| ESX1 | 80712 | cg04721883 | 103386233 | X | TRUE | 0.07 | 0.41 | 0.34 | 5.94 |
| EYA4 | 2070 | cg20330472 | 133603625 | 6 | TRUE | 0.11 | 0.41 | 0.30 | 3.86 |
| EYA4 | 2070 | cg20286200 | 133603960 | 6 | TRUE | 0.09 | 0.46 | 0.37 | 5.30 |
| EYA4 | 2070 | cg26656135 | 133604467 | 6 | TRUE | 0.04 | 0.36 | 0.33 | 9.77 |
| EYA4 | 2070 | cg24176563 | 133604469 | 6 | TRUE | 0.07 | 0.45 | 0.39 | 6.71 |
| EYA4 | 2070 | cg01805282 | 133605457 | 6 | TRUE | 0.06 | 0.54 | 0.48 | 8.67 |
| F2RL3 | 9002 | cg19006008 | 16860768 | 19 | FALSE | 0.20 | 0.52 | 0.32 | 2.60 |
| FAIM2 | 23017 | cg27188703 | 48583848 | 12 | TRUE | 0.24 | 0.63 | 0.39 | 2.65 |
| FBN2 | 2201 | cg27223047 | 127902724 | 5 | TRUE | 0.13 | 0.56 | 0.43 | 4.44 |
| FBXO39 | 162517 | cg02613386 | 6620257 | 17 | TRUE | 0.12 | 0.43 | 0.31 | 3.58 |
| FBXO39 | 162517 | cg20723355 | 6620321 | 17 | TRUE | 0.07 | 0.43 | 0.37 | 6.45 |
| FCER1A | 2205 | cg14696870 | 157525501 | 1 | FALSE | 0.67 | 0.34 | 0.34 | 0.50 |
| FCGR3A | 2214 | cg04384208 | 159786020 | 1 | FALSE | 0.67 | 0.36 | 0.31 | 0.53 |
| FCGRT | 2217 | cg15528736 | 54707592 | 19 | TRUE | 0.27 | 0.57 | 0.30 | 2.12 |
| FCRL3 | 115352 | cg25259754 | 155936844 | 1 | FALSE | 0.52 | 0.21 | 0.31 | 0.41 |
| FERD3L | 222894 | cg25691167 | 19151486 | 7 | TRUE | 0.10 | 0.47 | 0.37 | 4.75 |
| FLJ00060 | 90011 | cg03602500 | 59739533 | 19 | TRUE | 0.86 | 0.52 | 0.34 | 0.60 |
| FLJ12056 | 79998 | cg18006568 | 71059399 | 2 | TRUE | 0.23 | 0.63 | 0.40 | 2.74 |
| FLJ14503 | 256714 | cg10009830 | 20044825 | X | TRUE | 0.11 | 0.57 | 0.47 | 5.29 |
| FLJ20032 | 54790 | cg08924430 | 106286501 | 4 | TRUE | 0.14 | 0.48 | 0.35 | 3.58 |
| FLJ20920 | 80221 | cg14672994 | 45858056 | 17 | TRUE | 0.10 | 0.48 | 0.38 | 4.60 |
| FLJ21963 | 79611 | cg01283289 | 79996308 | 12 | TRUE | 0.08 | 0.41 | 0.32 | 4.84 |
| FLJ22555 | 79568 | cg13038560 | 200527358 | 2 | TRUE | 0.76 | 0.46 | 0.30 | 0.60 |
| FLJ34922 | 91607 | cg18108623 | 30725434 | 17 | TRUE | 0.08 | 0.41 | 0.32 | 4.96 |
| FLJ44674 | 400535 | cg13897627 | 47935998 | 16 | FALSE | 0.80 | 0.47 | 0.33 | 0.59 |
| FLJ46831 | 399823 | cg13929328 | 129425888 | 10 | TRUE | 0.14 | 0.54 | 0.40 | 3.83 |
| FLJ46831 | 399823 | cg19884262 | 129425958 | 10 | TRUE | 0.05 | 0.46 | 0.41 | 9.20 |
| FLJ90166 | 164284 | cg23418591 | 56523723 | 20 | TRUE | 0.08 | 0.39 | 0.31 | 5.12 |
| FLJ90650 | 206338 | cg15489294 | 115325752 | 5 | TRUE | 0.20 | 0.52 | 0.32 | 2.60 |
| FLJ90650 | 206338 | cg25044651 | 115326619 | 5 | TRUE | 0.17 | 0.58 | 0.41 | 3.44 |
| FLRT2 | 23768 | cg17410236 | 85066248 | 14 | TRUE | 0.06 | 0.55 | 0.49 | 8.52 |
| FLT4 | 2324 | cg00489401 | 180008481 | 5 | TRUE | 0.18 | 0.68 | 0.50 | 3.83 |
| GABRE | 2564 | cg12204574 | 150893428 | X | TRUE | 0.06 | 0.39 | 0.33 | 6.78 |
| GAL3ST3 | 89792 | cg21238818 | 65573218 | 11 | TRUE | 0.10 | 0.41 | 0.31 | 3.98 |
| GALR1 | 2587 | cg04534765 | 73091357 | 18 | TRUE | 0.06 | 0.47 | 0.41 | 7.46 |
| GAS6 | 2621 | cg26420196 | 113547877 | 13 | TRUE | 0.08 | 0.62 | 0.55 | 8.23 |
| GATA4 | 2626 | cg14900471 | 11599029 | 8 | TRUE | 0.05 | 0.36 | 0.31 | 7.07 |
| GBGT1 | 26301 | cg01169778 | 135028511 | 9 | TRUE | 0.44 | 0.75 | 0.30 | 1.68 |
| GCM2 | 9247 | cg09829319 | 10990224 | 6 | TRUE | 0.08 | 0.45 | 0.37 | 5.48 |
| GDAP1L1 | 78997 | cg04448487 | 42309191 | 20 | TRUE | 0.15 | 0.60 | 0.45 | 3.98 |
| GDF7 | 151449 | cg05899618 | 20729328 | 2 | TRUE | 0.13 | 0.44 | 0.30 | 3.28 |
| GFI1 | 2672 | cg22341104 | 92724849 | 1 | TRUE | 0.09 | 0.46 | 0.38 | 5.28 |
| GIPC2 | 54810 | cg24496666 | 78284567 | 1 | TRUE | 0.13 | 0.48 | 0.35 | 3.76 |
| GJB5 | 2709 | cg01333788 | 34993401 | 1 | FALSE | 0.30 | 0.62 | 0.33 | 2.11 |
| GLOXD1 | 84842 | cg26781150 | 45565129 | 1 | TRUE | 0.06 | 0.38 | 0.32 | 6.60 |
| GLP1R | 2740 | cg25014318 | 39124754 | 6 | TRUE | 0.11 | 0.45 | 0.34 | 4.00 |
| GNG4 | 2786 | cg09649610 | 233880662 | 1 | TRUE | 0.27 | 0.58 | 0.31 | 2.12 |
| GPR160 | 26996 | cg18741908 | 171239512 | 3 | TRUE | 0.46 | 0.16 | 0.30 | 0.34 |
| GPR75 | 10936 | cg14832904 | 53940532 | 2 | TRUE | 0.40 | 0.74 | 0.33 | 1.83 |
| GPR75 | 10936 | cg19664945 | 53940847 | 2 | TRUE | 0.28 | 0.65 | 0.36 | 2.29 |
| GPRASP2 | 114928 | cg00862041 | 101853673 | X | TRUE | 0.09 | 0.42 | 0.32 | 4.41 |
| GPX2 | 2877 | cg09643186 | 64479205 | 14 | FALSE | 0.47 | 0.78 | 0.31 | 1.66 |
| GPX3 | 2878 | cg21504918 | 150380194 | 5 | TRUE | 0.07 | 0.49 | 0.42 | 6.66 |
| GPX3 | 2878 | cg07699362 | 150380332 | 5 | TRUE | 0.03 | 0.42 | 0.39 | 15.21 |
| GPX3 | 2878 | cg21516478 | 150380521 | 5 | TRUE | 0.10 | 0.55 | 0.45 | 5.55 |
| GPX3 | 2878 | cg17820459 | 150380724 | 5 | TRUE | 0.07 | 0.51 | 0.44 | 7.27 |
| GPX7 | 2882 | cg22129364 | 52840482 | 1 | TRUE | 0.06 | 0.51 | 0.46 | 8.88 |
| GPX7 | 2882 | cg16557944 | 52840785 | 1 | TRUE | 0.04 | 0.62 | 0.58 | 15.58 |
| GRASP | 160622 | cg04034767 | 50687174 | 12 | TRUE | 0.08 | 0.70 | 0.62 | 8.76 |
| GREM1 | 26585 | cg18145505 | 30796790 | 15 | TRUE | 0.19 | 0.49 | 0.30 | 2.58 |
| GRIA3 | 2892 | cg23424962 | 122146020 | X | TRUE | 0.08 | 0.58 | 0.50 | 7.31 |
| GRIA4 | 2893 | cg19343464 | 104986719 | 11 | TRUE | 0.06 | 0.42 | 0.36 | 6.58 |
| GRIK3 | 2899 | cg06722633 | 37271896 | 1 | TRUE | 0.11 | 0.47 | 0.37 | 4.39 |
| GRM4 | 2914 | cg01962826 | 34208945 | 6 | TRUE | 0.90 | 0.57 | 0.33 | 0.63 |
| GSH2 | 170825 | cg21905630 | 54660661 | 4 | TRUE | 0.07 | 0.43 | 0.36 | 5.96 |
| GSTM2 | 2946 | cg03070194 | 110012207 | 1 | FALSE | 0.05 | 0.45 | 0.40 | 8.94 |
| GSTM2 | 2946 | cg16670497 | 110012436 | 1 | TRUE | 0.08 | 0.39 | 0.31 | 4.96 |
| GSTP1 | 2950 | cg02659086 | 67107552 | 11 | TRUE | 0.05 | 0.58 | 0.53 | 12.07 |
| GSTP1 | 2950 | cg04920951 | 67107847 | 11 | TRUE | 0.11 | 0.56 | 0.45 | 4.96 |
| GSTP1 | 2950 | cg09038676 | 67108184 | 11 | TRUE | 0.11 | 0.42 | 0.31 | 3.71 |
| GSTP1 | 2950 | cg11566244 | 67108362 | 11 | TRUE | 0.28 | 0.63 | 0.35 | 2.27 |
| HAPLN3 | 145864 | cg08348496 | 87239675 | 15 | TRUE | 0.03 | 0.50 | 0.47 | 19.75 |
| HCA112 | 55365 | cg26385222 | 150128010 | 7 | TRUE | 0.26 | 0.62 | 0.36 | 2.42 |
| HCA112 | 55365 | cg02244695 | 150128279 | 7 | TRUE | 0.11 | 0.50 | 0.39 | 4.45 |
| HEYL | 26508 | cg25462291 | 39877643 | 1 | TRUE | 0.15 | 0.52 | 0.38 | 3.54 |
| HHIP | 64399 | cg14580567 | 145786721 | 4 | TRUE | 0.07 | 0.46 | 0.39 | 6.84 |
| HIF3A | 64344 | cg02879662 | 51492307 | 19 | TRUE | 0.12 | 0.51 | 0.39 | 4.42 |
| HIST1H1A | 3024 | cg10146929 | 26125918 | 6 | TRUE | 0.14 | 0.49 | 0.34 | 3.37 |
| HIST1H3E | 8353 | cg07922606 | 26333368 | 6 | TRUE | 0.42 | 0.74 | 0.32 | 1.75 |
| HIST1H3G | 8355 | cg02909790 | 26379566 | 6 | TRUE | 0.12 | 0.52 | 0.40 | 4.39 |
| HIST1H3J | 8356 | cg17965019 | 27966524 | 6 | TRUE | 0.16 | 0.57 | 0.41 | 3.60 |
| HIST1H3J | 8356 | cg17718302 | 27966616 | 6 | TRUE | 0.06 | 0.44 | 0.38 | 6.87 |
| HIST1H4D | 8360 | cg21026663 | 26297213 | 6 | TRUE | 0.04 | 0.47 | 0.43 | 11.91 |
| HLA-G | 3135 | cg21529533 | 29903994 | 6 | TRUE | 0.07 | 0.47 | 0.40 | 6.61 |
| HLF | 3131 | cg15835232 | 50698074 | 17 | TRUE | 0.05 | 0.59 | 0.54 | 11.05 |
| HOXA5 | 3202 | cg02248486 | 27149721 | 7 | TRUE | 0.42 | 0.73 | 0.31 | 1.74 |
| HOXB4 | 3214 | cg06760035 | 44010244 | 17 | TRUE | 0.14 | 0.51 | 0.38 | 3.70 |
| HOXB4 | 3214 | cg14458834 | 44010393 | 17 | TRUE | 0.11 | 0.51 | 0.40 | 4.62 |
| HOXB4 | 3214 | cg08089301 | 44010560 | 17 | TRUE | 0.25 | 0.63 | 0.39 | 2.58 |
| HOXC11 | 3227 | cg22709192 | 52653176 | 12 | TRUE | 0.21 | 0.60 | 0.39 | 2.84 |
| HOXD3 | 3232 | cg18702197 | 176735887 | 2 | TRUE | 0.21 | 0.52 | 0.31 | 2.46 |
| HAAO | 23498 | cg20289949 | 42873118 | 2 | TRUE | 0.21 | 0.67 | 0.46 | 3.19 |
| HAAO | 23498 | cg01561916 | 42873673 | 2 | TRUE | 0.04 | 0.64 | 0.59 | 14.81 |
| IGKV7- | 28905 | cg23984130 | 88996300 | 2 | FALSE | 0.76 | 0.46 | 0.30 | 0.60 |
| IMP4 | 92856 | cg09640202 | 130817910 | 2 | TRUE | 0.78 | 0.42 | 0.36 | 0.54 |
| IRXL1 | 283078 | cg02161900 | 28075637 | 10 | TRUE | 0.20 | 0.53 | 0.34 | 2.72 |
| ITGA11 | 22801 | cg14188232 | 66511119 | 15 | TRUE | 0.14 | 0.48 | 0.33 | 3.35 |
| ITGA4 | 3676 | cg20415809 | 182030100 | 2 | TRUE | 0.05 | 0.41 | 0.36 | 8.34 |
| IVL | 3713 | cg05440289 | 151147743 | 1 | FALSE | 0.79 | 0.47 | 0.32 | 0.60 |
| KCNB2 | 9312 | cg20890210 | 73612735 | 8 | TRUE | 0.11 | 0.46 | 0.35 | 4.20 |
| KCNE3 | 10008 | cg23189044 | 73855762 | 11 | TRUE | 0.07 | 0.41 | 0.34 | 5.55 |
| KCNE3 | 10008 | cg02595219 | 73856409 | 11 | TRUE | 0.25 | 0.58 | 0.33 | 2.32 |
| KCNIP2 | 30819 | cg04997967 | 103593478 | 10 | TRUE | 0.29 | 0.62 | 0.33 | 2.12 |
| KCTD8 | 386617 | cg12300353 | 44145115 | 4 | TRUE | 0.05 | 0.42 | 0.38 | 9.01 |
| KLF8 | 11279 | cg06457357 | 56275968 | X | TRUE | 0.12 | 0.56 | 0.44 | 4.80 |
| KLHL1 | 57626 | cg20523861 | 69580325 | 13 | TRUE | 0.21 | 0.58 | 0.37 | 2.79 |
| KLK10 | 5655 | cg08818784 | 56214010 | 19 | TRUE | 0.05 | 0.59 | 0.55 | 12.77 |
| KLK10 | 5655 | cg24512400 | 56214373 | 19 | TRUE | 0.05 | 0.54 | 0.48 | 10.10 |
| KLK10 | 5655 | cg15910208 | 56214400 | 19 | TRUE | 0.05 | 0.50 | 0.45 | 10.01 |
| KLK13 | 26085 | cg26524263 | 56260148 | 19 | TRUE | 0.06 | 0.38 | 0.32 | 6.46 |
| KRT5 | 3852 | cg23645091 | 51200676 | 12 | FALSE | 0.28 | 0.58 | 0.31 | 2.10 |
| KRTAP11-1 | 337880 | cg07014174 | 31175631 | 21 | FALSE | 0.71 | 0.36 | 0.35 | 0.51 |
| LAMA2 | 3908 | cg20640433 | 129245899 | 6 | TRUE | 0.12 | 0.51 | 0.39 | 4.39 |
| LAMA2 | 3908 | cg19774122 | 129246315 | 6 | TRUE | 0.07 | 0.39 | 0.33 | 6.00 |
| LEP | 3952 | cg12782180 | 127668168 | 7 | TRUE | 0.33 | 0.68 | 0.35 | 2.05 |
| LEP | 3952 | cg19594666 | 127668516 | 7 | TRUE | 0.30 | 0.71 | 0.40 | 2.32 |
| LGALS1 | 3956 | cg19853760 | 36401623 | 22 | FALSE | 0.24 | 0.55 | 0.31 | 2.30 |
| LOC349136 | 349136 | cg19831077 | 150738857 | 7 | TRUE | 0.27 | 0.64 | 0.37 | 2.37 |
| LOC387758 | 387758 | cg04622802 | 26972448 | 11 | TRUE | 0.17 | 0.56 | 0.39 | 3.27 |
| LOC63928 | 63928 | cg15309006 | 23673617 | 16 | TRUE | 0.06 | 0.45 | 0.39 | 7.74 |
| LPA | 4018 | cg07260592 | 161020112 | 6 | TRUE | 0.16 | 0.58 | 0.41 | 3.57 |
| LR8 | 28959 | cg08359956 | 150129138 | 7 | TRUE | 0.13 | 0.54 | 0.40 | 3.97 |
| LRRC4 | 64101 | cg15087147 | 127459405 | 7 | TRUE | 0.04 | 0.47 | 0.44 | 13.20 |
| LTC4S | 4056 | cg16361890 | 179153151 | 5 | FALSE | 0.22 | 0.54 | 0.32 | 2.48 |
| LTC4S | 4056 | cg11394785 | 179153696 | 5 | FALSE | 0.26 | 0.59 | 0.33 | 2.29 |
| LTF | 4057 | cg15261665 | 46481378 | 3 | TRUE | 0.19 | 0.57 | 0.38 | 2.97 |
| LTF | 4057 | cg17527798 | 46481408 | 3 | TRUE | 0.25 | 0.61 | 0.36 | 2.42 |
| MAGEB6 | 158809 | cg10127415 | 26120444 | X | FALSE | 0.81 | 0.51 | 0.30 | 0.63 |
| MAPK15 | 225689 | cg22892110 | 144870619 | 8 | TRUE | 0.13 | 0.61 | 0.49 | 4.88 |
| MBL2 | 4153 | cg13882988 | 54201351 | 10 | FALSE | 0.77 | 0.46 | 0.31 | 0.60 |
| MCAM | 4162 | cg21096399 | 118693355 | 11 | TRUE | 0.21 | 0.57 | 0.37 | 2.77 |
| MGC39606 | 399668 | cg17231524 | 134384171 | X | TRUE | 0.10 | 0.54 | 0.44 | 5.41 |
| MMP14 | 4323 | cg09208010 | 22375620 | 14 | TRUE | 0.11 | 0.43 | 0.33 | 4.10 |
| MNDA | 4332 | cg25119415 | 157066559 | 1 | FALSE | 0.71 | 0.37 | 0.34 | 0.52 |
| MOBKL2B | 79817 | cg22262168 | 27518999 | 9 | TRUE | 0.07 | 0.63 | 0.55 | 8.89 |
| MRPL30 | 51263 | cg15612847 | 99162750 | 2 | TRUE | 0.79 | 0.46 | 0.33 | 0.58 |
| MSC | 9242 | cg23710218 | 72919210 | 8 | TRUE | 0.23 | 0.55 | 0.32 | 2.39 |
| MYO3A | 53904 | cg08441170 | 26263106 | 10 | TRUE | 0.10 | 0.61 | 0.50 | 5.93 |
| MYO3A | 53904 | cg23771603 | 26263316 | 10 | TRUE | 0.07 | 0.57 | 0.50 | 8.19 |
| MYR8 | 23026 | cg18946226 | 108046504 | 13 | FALSE | 0.25 | 0.56 | 0.31 | 2.28 |
| NALP10 | 338322 | cg18484189 | 7941549 | 11 | FALSE | 0.68 | 0.31 | 0.37 | 0.46 |
| NALP14 | 338323 | cg25203856 | 7016556 | 11 | FALSE | 0.70 | 0.37 | 0.34 | 0.52 |
| NCAM2 | 4685 | cg13297960 | 21292108 | 21 | TRUE | 0.08 | 0.39 | 0.31 | 5.05 |
| NDRG2 | 57447 | cg18081258 | 20564001 | 14 | TRUE | 0.20 | 0.55 | 0.35 | 2.74 |
| NEF3 | 4741 | cg23290344 | 24827371 | 8 | TRUE | 0.13 | 0.53 | 0.40 | 4.07 |
| NEU1 | 4758 | cg14976276 | 31938609 | 6 | TRUE | 0.02 | 0.35 | 0.33 | 14.25 |
| NEUROD1 | 4760 | cg22359606 | 182253737 | 2 | TRUE | 0.10 | 0.43 | 0.32 | 4.10 |
| NFAM1 | 150372 | cg17568996 | 41158069 | 22 | FALSE | 0.15 | 0.51 | 0.37 | 3.54 |
| NFATC4 | 4776 | cg06111454 | 23907676 | 14 | FALSE | 0.08 | 0.41 | 0.33 | 5.22 |
| NID2 | 22795 | cg22881914 | 51605897 | 14 | TRUE | 0.37 | 0.72 | 0.36 | 1.97 |
| NIFIE14 | 10430 | cg00739120 | 40727715 | 19 | TRUE | 0.23 | 0.54 | 0.31 | 2.38 |
| NIP | 90527 | cg15105703 | 43209152 | 15 | TRUE | 0.09 | 0.53 | 0.44 | 5.83 |
| NIPSNAP1 | 8508 | cg13797031 | 28307742 | 22 | FALSE | 0.67 | 0.34 | 0.33 | 0.51 |
| NOX4 | 50507 | cg17063929 | 88864447 | 11 | TRUE | 0.25 | 0.55 | 0.30 | 2.22 |
| NPTX2 | 4885 | cg00548268 | 98083766 | 7 | TRUE | 0.33 | 0.64 | 0.31 | 1.93 |
| NR2E1 | 7101 | cg03958979 | 108593080 | 6 | TRUE | 0.31 | 0.63 | 0.32 | 2.01 |
| NR2E1 | 7101 | cg19697981 | 108594513 | 6 | TRUE | 0.12 | 0.43 | 0.31 | 3.55 |
| NRG1 | 3084 | cg17457560 | 32525393 | 8 | TRUE | 0.05 | 0.37 | 0.32 | 6.95 |
| NUAK1 | 9891 | cg23555120 | 105057993 | 12 | TRUE | 0.30 | 0.63 | 0.33 | 2.12 |
| NXF2 | 56001 | cg00280894 | 101365619 | X | FALSE | 0.69 | 0.38 | 0.31 | 0.55 |
| OR10A5 | 144124 | cg22951794 | 6823856 | 11 | FALSE | 0.76 | 0.39 | 0.37 | 0.51 |
| OR1F1 | 4992 | cg07879977 | 3194568 | 16 | FALSE | 0.67 | 0.36 | 0.31 | 0.53 |
| OR1G1 | 8390 | cg27622610 | 2976935 | 17 | FALSE | 0.71 | 0.39 | 0.32 | 0.55 |
| OR5P3 | 120066 | cg01469547 | 7803731 | 11 | FALSE | 0.87 | 0.49 | 0.38 | 0.56 |
| OTOP1 | 133060 | cg14882700 | 4279472 | 4 | TRUE | 0.16 | 0.47 | 0.31 | 2.91 |
| OXGR1 | 27199 | cg00158308 | 96444342 | 13 | FALSE | 0.07 | 0.45 | 0.39 | 6.85 |
| OXGR1 | 27199 | cg23037133 | 96444812 | 13 | TRUE | 0.08 | 0.39 | 0.31 | 4.93 |
| PAH | 5053 | cg15963417 | 101835430 | 12 | TRUE | 0.05 | 0.39 | 0.34 | 8.00 |
| PAH | 5053 | cg24759821 | 101835592 | 12 | FALSE | 0.09 | 0.46 | 0.37 | 5.18 |
| PALM | 5064 | cg00174901 | 660889 | 19 | FALSE | 0.12 | 0.44 | 0.32 | 3.64 |
| PAQR9 | 344838 | cg00970325 | 144165866 | 3 | TRUE | 0.10 | 0.51 | 0.41 | 5.01 |
| PAX4 | 5078 | cg08886154 | 127043912 | 7 | FALSE | 0.65 | 0.34 | 0.32 | 0.52 |
| PAX7 | 5081 | cg11428724 | 18830219 | 1 | TRUE | 0.10 | 0.44 | 0.33 | 4.28 |
| PCDHB15 | 56121 | cg11368643 | 140605243 | 5 | TRUE | 0.21 | 0.58 | 0.37 | 2.71 |
| PDE4C | 5143 | cg17861230 | 18204901 | 19 | TRUE | 0.18 | 0.49 | 0.31 | 2.69 |
| PDGFRB | 5159 | cg12727795 | 149515888 | 5 | TRUE | 0.12 | 0.55 | 0.43 | 4.65 |
| PENK | 5179 | cg04598121 | 57521059 | 8 | TRUE | 0.17 | 0.54 | 0.36 | 3.13 |
| PGLYRP3 | 114771 | cg09448880 | 151550465 | 1 | FALSE | 0.74 | 0.41 | 0.33 | 0.56 |
| PHOX2A | 401 | cg18722841 | 71632630 | 11 | TRUE | 0.06 | 0.45 | 0.39 | 7.43 |
| PHOX2A | 401 | cg08876932 | 71633195 | 11 | TRUE | 0.08 | 0.47 | 0.39 | 5.89 |
| PIP5KL1 | 138429 | cg10082841 | 129729142 | 9 | TRUE | 0.14 | 0.45 | 0.31 | 3.26 |
| PLEKHA4 | 57664 | cg06339706 | 54063097 | 19 | FALSE | 0.35 | 0.68 | 0.34 | 1.97 |
| PNMA3 | 29944 | cg00800095 | 151974746 | X | TRUE | 0.55 | 0.87 | 0.32 | 1.58 |
| PODN | 127435 | cg23092823 | 53301200 | 1 | TRUE | 0.12 | 0.45 | 0.33 | 3.76 |
| POMC | 5443 | cg16302441 | 25245334 | 2 | TRUE | 0.22 | 0.54 | 0.31 | 2.40 |
| POP2 | 152138 | cg16739580 | 192661768 | 3 | FALSE | 0.69 | 0.39 | 0.30 | 0.56 |
| PPT2 | 9374 | cg17329164 | 32229237 | 6 | TRUE | 0.15 | 0.51 | 0.36 | 3.42 |
| PRAP1 | 118471 | cg10742801 | 135011037 | 10 | FALSE | 0.23 | 0.54 | 0.31 | 2.36 |
| PRDM14 | 63978 | cg01295203 | 71146753 | 8 | TRUE | 0.15 | 0.46 | 0.32 | 3.16 |
| PRKAR1B | 5575 | cg13577076 | 718982 | 7 | TRUE | 0.09 | 0.50 | 0.41 | 5.44 |
| PRKCB1 | 5579 | cg05436658 | 23755069 | 16 | TRUE | 0.03 | 0.48 | 0.45 | 16.25 |
| PRR3 | 80742 | cg21264055 | 30631221 | 6 | TRUE | 0.12 | 0.42 | 0.30 | 3.63 |
| PRRT1 | 80863 | cg25426302 | 32228804 | 6 | TRUE | 0.21 | 0.52 | 0.30 | 2.43 |
| PSTPIP1 | 9051 | cg26025891 | 75074954 | 15 | FALSE | 0.19 | 0.55 | 0.36 | 2.87 |
| PTF1A | 256297 | cg11438428 | 23521600 | 10 | TRUE | 0.12 | 0.48 | 0.36 | 4.09 |
| PTPRO | 5800 | cg10646402 | 15366757 | 12 | TRUE | 0.02 | 0.34 | 0.31 | 14.12 |
| PYCARD | 29108 | cg12100791 | 31121918 | 16 | TRUE | 0.20 | 0.58 | 0.38 | 2.93 |
| RAB33A | 9363 | cg24340926 | 129132717 | X | TRUE | 0.13 | 0.53 | 0.40 | 4.20 |
| RAB34 | 83871 | cg21237418 | 24069170 | 17 | TRUE | 0.22 | 0.54 | 0.32 | 2.43 |
| RARA | 5914 | cg03085312 | 35718807 | 17 | FALSE | 0.15 | 0.53 | 0.38 | 3.51 |
| RARA | 5914 | cg00236832 | 35719015 | 17 | FALSE | 0.13 | 0.48 | 0.35 | 3.66 |
| RARB | 5915 | cg26124016 | 25444406 | 3 | TRUE | 0.08 | 0.39 | 0.32 | 5.23 |
| RARB | 5915 | cg27486427 | 25444923 | 3 | TRUE | 0.11 | 0.41 | 0.30 | 3.89 |
| RASL10B | 91608 | cg02927346 | 31083373 | 17 | TRUE | 0.10 | 0.47 | 0.37 | 4.73 |
| RASL12 | 51285 | cg10604168 | 63147423 | 15 | TRUE | 0.06 | 0.42 | 0.36 | 7.01 |
| RASSF5 | 83593 | cg17558126 | 204746873 | 1 | TRUE | 0.11 | 0.48 | 0.37 | 4.40 |
| RBP1 | 5947 | cg23363832 | 140741629 | 3 | TRUE | 0.25 | 0.58 | 0.33 | 2.32 |
| RGN | 9104 | cg09625066 | 46822515 | X | TRUE | 0.42 | 0.76 | 0.34 | 1.81 |
| RGN | 9104 | cg07654896 | 46822773 | X | TRUE | 0.26 | 0.71 | 0.45 | 2.69 |
| RHCG | 51458 | cg24653181 | 87840586 | 15 | TRUE | 0.26 | 0.61 | 0.35 | 2.35 |
| RHCG | 51458 | cg10453365 | 87840913 | 15 | TRUE | 0.20 | 0.61 | 0.41 | 3.00 |
| RND2 | 8153 | cg05270634 | 38430971 | 17 | TRUE | 0.07 | 0.64 | 0.57 | 9.70 |
| RP11- | 257240 | cg21655480 | 21586973 | X | TRUE | 0.13 | 0.46 | 0.33 | 3.44 |
| 450P7.3 | | | | | | | | | |
| RPIP8 | 10900 | cg13102585 | 39741734 | 17 | TRUE | 0.16 | 0.54 | 0.38 | 3.29 |
| RPUSD3 | 285367 | cg26417554 | 9861232 | 3 | TRUE | 0.68 | 0.36 | 0.32 | 0.53 |
| RUSC2 | 9853 | cg15271616 | 35480515 | 9 | TRUE | 0.13 | 0.56 | 0.44 | 4.44 |
| SARM1 | 23098 | cg23887396 | 23723678 | 17 | TRUE | 0.04 | 0.35 | 0.31 | 8.13 |
| SART2 | 29940 | cg09025324 | 116798378 | 6 | TRUE | 0.11 | 0.52 | 0.41 | 4.66 |
| SCARF2 | 91179 | cg14785479 | 19122535 | 22 | TRUE | 0.08 | 0.52 | 0.44 | 6.66 |
| SCTR | 6344 | cg15250797 | 119997996 | 2 | TRUE | 0.13 | 0.44 | 0.31 | 3.39 |
| SCUBE3 | 222663 | cg00347904 | 35290486 | 6 | TRUE | 0.09 | 0.40 | 0.31 | 4.44 |
| SEMA5A | 9037 | cg03702236 | 9599755 | 5 | TRUE | 0.07 | 0.46 | 0.39 | 6.43 |
| SEPT9′ | 10801 | cg04452095 | 72827463 | 17 | TRUE | 0.18 | 0.52 | 0.34 | 2.97 |
| SEPT9′ | 10801 | cg03330678 | 72827828 | 17 | TRUE | 0.34 | 0.65 | 0.30 | 1.89 |
| SERPINB9 | 5272 | cg18676237 | 2848257 | 6 | TRUE | 0.06 | 0.39 | 0.33 | 6.75 |
| SFRP2 | 6423 | cg11354906 | 154929821 | 4 | TRUE | 0.10 | 0.44 | 0.34 | 4.37 |
| SFRP2 | 6423 | cg23207990 | 154929985 | 4 | TRUE | 0.10 | 0.41 | 0.31 | 4.15 |
| SHANK2 | 22941 | cg04396791 | 70185828 | 11 | TRUE | 0.23 | 0.56 | 0.32 | 2.37 |
| SIX6 | 4990 | cg19456540 | 60046038 | 14 | TRUE | 0.24 | 0.58 | 0.34 | 2.41 |
| SLC16A5 | 9121 | cg27619475 | 70595476 | 17 | TRUE | 0.08 | 0.48 | 0.41 | 6.33 |
| SLC16A5 | 9121 | cg09300114 | 70595924 | 17 | TRUE | 0.25 | 0.66 | 0.41 | 2.66 |
| SLC17A8 | 246213 | cg06563300 | 99274942 | 12 | FALSE | 0.14 | 0.45 | 0.32 | 3.27 |
| SLC19A3 | 80704 | cg25713185 | 228290730 | 2 | TRUE | 0.10 | 0.50 | 0.40 | 5.24 |
| SLC2A2 | 6514 | cg03699904 | 172228723 | 3 | TRUE | 0.08 | 0.43 | 0.35 | 5.55 |
| SLC34A2 | 10568 | cg19616230 | 25266527 | 4 | TRUE | 0.08 | 0.52 | 0.44 | 6.42 |
| SLC5A7 | 60482 | cg16232126 | 107969437 | 2 | TRUE | 0.12 | 0.49 | 0.37 | 4.15 |
| SLC6A3 | 6531 | cg13202751 | 1499443 | 5 | TRUE | 0.21 | 0.56 | 0.35 | 2.66 |
| SLC7A3 | 84889 | cg20622056 | 70067859 | X | TRUE | 0.12 | 0.45 | 0.33 | 3.66 |
| SLITRK1 | 114798 | cg07104706 | 83354128 | 13 | TRUE | 0.13 | 0.46 | 0.32 | 3.40 |
| SMARCA1 | 6594 | cg24447042 | 128485574 | X | TRUE | 0.19 | 0.55 | 0.35 | 2.81 |
| SNCAIP | 9627 | cg04747322 | 121675207 | 5 | TRUE | 0.12 | 0.44 | 0.31 | 3.59 |
| SOX17 | 64321 | cg02919422 | 55533097 | 8 | TRUE | 0.22 | 0.58 | 0.36 | 2.61 |
| SPAG6 | 9576 | cg25802093 | 22674044 | 10 | TRUE | 0.24 | 0.61 | 0.38 | 2.60 |
| SPATA6 | 54558 | cg09704415 | 48709837 | 1 | TRUE | 0.14 | 0.49 | 0.35 | 3.44 |
| SPDY1 | 245711 | cg04786857 | 28887401 | 2 | TRUE | 0.08 | 0.43 | 0.34 | 5.09 |
| SPG20 | 23111 | cg18755783 | 35817905 | 13 | TRUE | 0.11 | 0.45 | 0.33 | 3.97 |
| SST | 6750 | cg02164046 | 188870842 | 3 | TRUE | 0.10 | 0.55 | 0.45 | 5.71 |
| SSTR4 | 6754 | cg17586860 | 22963906 | 20 | TRUE | 0.11 | 0.52 | 0.41 | 4.80 |
| SSX4 | 6759 | cg10575735 | 48156567 | X | FALSE | 0.78 | 0.48 | 0.30 | 0.61 |
| ST6GALNAC3 | 256435 | cg12601757 | 76313053 | 1 | TRUE | 0.09 | 0.50 | 0.41 | 5.85 |
| ST8SIA5 | 29906 | cg19751300 | 42590397 | 18 | TRUE | 0.10 | 0.43 | 0.33 | 4.41 |
| SV2A | 9900 | cg01705587 | 148155988 | 1 | TRUE | 0.03 | 0.36 | 0.33 | 12.28 |
| SYN2 | 6854 | cg15873301 | 12020459 | 3 | TRUE | 0.04 | 0.42 | 0.37 | 10.11 |
| SYNGR1 | 9145 | cg19713460 | 38075476 | 22 | TRUE | 0.13 | 0.49 | 0.36 | 3.83 |
| TAC1 | 6863 | cg07550362 | 97199137 | 7 | TRUE | 0.11 | 0.41 | 0.30 | 3.65 |
| TACR2 | 6865 | cg26984805 | 70846507 | 10 | FALSE | 0.33 | 0.68 | 0.36 | 2.09 |
| TBX20 | 57057 | cg13870866 | 35259655 | 7 | TRUE | 0.16 | 0.51 | 0.35 | 3.17 |
| TDRD1 | 56165 | cg27547703 | 115929014 | 10 | TRUE | 0.74 | 0.41 | 0.34 | 0.55 |
| TLX3 | 30012 | cg25942450 | 170668856 | 5 | TRUE | 0.20 | 0.54 | 0.34 | 2.74 |
| TLX3 | 30012 | cg25720804 | 170668994 | 5 | TRUE | 0.12 | 0.65 | 0.52 | 5.24 |
| TMEM22 | 80723 | cg02672493 | 138020399 | 3 | TRUE | 0.17 | 0.48 | 0.31 | 2.77 |
| TMLHE | 55217 | cg06659128 | 154495729 | X | TRUE | 0.06 | 0.41 | 0.35 | 6.98 |
| TNFRSF10C | 8794 | cg16175263 | 23016330 | 8 | TRUE | 0.24 | 0.55 | 0.31 | 2.26 |
| TNFRSF10C | 8794 | cg05636175 | 23016342 | 8 | TRUE | 0.15 | 0.53 | 0.38 | 3.55 |
| TNFRSF10C | 8794 | cg27090216 | 23016406 | 8 | TRUE | 0.05 | 0.38 | 0.33 | 7.92 |
| TNFRSF10C | 8794 | cg14015044 | 23016564 | 8 | TRUE | 0.04 | 0.51 | 0.47 | 12.28 |
| TNS1 | 7145 | cg18328334 | 218516897 | 2 | FALSE | 0.24 | 0.58 | 0.34 | 2.40 |
| TP73 | 7161 | cg25115460 | 3596970 | 1 | TRUE | 0.41 | 0.77 | 0.35 | 1.85 |
| TP73 | 7161 | cg16607065 | 3597082 | 1 | TRUE | 0.21 | 0.55 | 0.34 | 2.59 |
| TP73 | 7161 | cg03846767 | 3597152 | 1 | TRUE | 0.34 | 0.71 | 0.37 | 2.09 |
| TPM4 | 7171 | cg26968812 | 16047873 | 19 | TRUE | 0.14 | 0.48 | 0.34 | 3.34 |
| TPM4 | 7171 | cg16232979 | 16048631 | 19 | TRUE | 0.20 | 0.67 | 0.47 | 3.39 |
| TRH | 7200 | cg01009664 | 131176303 | 3 | TRUE | 0.12 | 0.55 | 0.44 | 4.76 |
| TRHR | 7201 | cg22268164 | 110168926 | 8 | FALSE | 0.73 | 0.39 | 0.34 | 0.54 |
| TRIM29 | 23650 | cg13625403 | 119513720 | 11 | TRUE | 0.45 | 0.76 | 0.31 | 1.68 |
| TRIP6 | 7205 | cg01274660 | 100303561 | 7 | FALSE | 0.19 | 0.49 | 0.30 | 2.61 |
| TRPA1 | 8989 | cg01610488 | 73150424 | 8 | TRUE | 0.06 | 0.39 | 0.33 | 6.93 |
| TRPC1 | 7220 | cg24794531 | 143926527 | 3 | TRUE | 0.06 | 0.47 | 0.41 | 7.72 |
| TRPM3 | 80036 | cg16832407 | 72926359 | 9 | FALSE | 0.16 | 0.47 | 0.31 | 3.00 |
| TTC22 | 55001 | cg24697184 | 55039166 | 1 | TRUE | 0.06 | 0.45 | 0.39 | 7.22 |
| UBE2V2 | 7336 | cg25612480 | 49083013 | 8 | TRUE | 0.76 | 0.46 | 0.30 | 0.60 |
| UCHL1 | 7345 | cg24715245 | 40953551 | 4 | TRUE | 0.15 | 0.50 | 0.35 | 3.32 |
| UCN | 7349 | cg04527918 | 27384674 | 2 | TRUE | 0.36 | 0.71 | 0.35 | 1.96 |
| UGT3A1 | 133688 | cg23317501 | 36026972 | 5 | FALSE | 0.08 | 0.41 | 0.33 | 5.40 |
| UGT3A2 | 167127 | cg07084163 | 36102540 | 5 | TRUE | 0.15 | 0.49 | 0.33 | 3.18 |
| UNQ739 | 375567 | cg00333226 | 49784309 | 7 | TRUE | 0.10 | 0.43 | 0.33 | 4.39 |
| VGLL2 | 245806 | cg03160135 | 117693611 | 6 | TRUE | 0.12 | 0.42 | 0.30 | 3.58 |
| WDR40B | 139170 | cg22980351 | 125514720 | X | TRUE | 0.20 | 0.52 | 0.31 | 2.54 |
| WDR69 | 164781 | cg21577049 | 228444693 | 2 | TRUE | 0.07 | 0.42 | 0.35 | 6.01 |
| WFDC2 | 10406 | cg25799986 | 43531695 | 20 | TRUE | 0.22 | 0.59 | 0.37 | 2.74 |
| WFDC2 | 10406 | cg00980978 | 43532138 | 20 | TRUE | 0.09 | 0.48 | 0.39 | 5.30 |
| WNK3 | 65267 | cg12707233 | 54401689 | X | TRUE | 0.06 | 0.36 | 0.31 | 6.30 |
| ZFP42 | 132625 | cg06274159 | 189153861 | 4 | TRUE | 0.14 | 0.59 | 0.45 | 4.29 |
| ZIC3 | 7547 | cg13613682 | 136476219 | X | TRUE | 0.16 | 0.55 | 0.39 | 3.36 |
| ZNF154 | 7710 | cg21790626 | 62912306 | 19 | TRUE | 0.17 | 0.59 | 0.42 | 3.41 |
| ZNF154 | 7710 | cg08668790 | 62912474 | 19 | TRUE | 0.21 | 0.60 | 0.39 | 2.88 |
| ZNF436 | 80818 | cg10347418 | 23566513 | 1 | FALSE | 0.73 | 0.40 | 0.32 | 0.56 |
| ZNF454 | 285676 | cg03355526 | 178301021 | 5 | TRUE | 0.17 | 0.49 | 0.31 | 2.83 |
| ZNF541 | 84215 | cg22341310 | 52740395 | 19 | TRUE | 0.22 | 0.60 | 0.37 | 2.67 |
| ZNF553 | 197407 | cg16014085 | 30313623 | 16 | TRUE | 0.18 | 0.55 | 0.37 | 3.10 |
| ZNF577 | 84765 | cg16731240 | 57083062 | 19 | TRUE | 0.16 | 0.61 | 0.45 | 3.75 |
| ZNF660 | 285349 | cg22598028 | 44601496 | 3 | TRUE | 0.05 | 0.48 | 0.43 | 9.81 |
| ZNF96 | 9753 | cg02622316 | 28475389 | 6 | TRUE | 0.08 | 0.51 | 0.43 | 6.11 |

SYMBOL: gene symbol.
GENE ID: NCBI Gene ID.
CpG site: Infinium CpG site identification number.
MAPINFO: Chromosomal coordinate (hg18).
CHR: Chromosome.
CPG ISLAND: Infinium annotation of CpG site location relative to CpG islands.
Mean β ADJ-N: Mean β value of ADJ-N samples excluding smallest and largest value.
Mean β PC: Mean β value of PC samples excluding smallest and largest value.
Δβ: |(Mean β ADJ-N) − (Mean β PC)|.
Xβ: (Mean β PC)/(Mean β ADJ-N). Genes selected for further analysis in purple.

TABLE 2
Candidate hypermethylation markers

| | | | | | RNA* | |
|---|---|---|---|---|---|---|
| | | | Methylation | | Fold change in | Sign/total |
| Gene | GeneID | CpG site | Xβ | Δβ | PC | datasets |
| AOX1 | 316 | cg02144933 | 11.0 | 0.51 | −1.872 to −4.390 | 10/14 |
| | | cg12627583 | 9.9 | 0.49 | | |
| C1orf114 | 57821 | cg08047907 | 6.6 | 0.43 | −1.747 | 1/6 |
| | | cg13958426 | 8.0 | 0.41 | | |
| GAS6 | 2621 | cg26420196 | 8.2 | 0.55 | −1.556 to −2.969 | 3/15 |
| HAPLN3 | 145864 | cg08348496 | 19.7 | 0.47 | — | 0/6 |
| | | cg03698393* | 9.0 | 0.28 | | |
| ST6GALNAC3 | 256435 | cg12604757 | 5.8 | 0.41 | −1.784 | 1/5 |
| ZNF660 | 285349 | cg22598028 | 9.8 | 0.43 | — | 0/4 |

Candidates selected for validation.
Xβ: Mean β value of PC samples/mean β value of ADJ-N samples.
Δβ: Mean β value of PC samples − mean β value of ADJ-N samples.
*Δβ<0.3 but β-values significantly different between PC and ADJ-N samples.
*Datasets surveyed via oncomine.org, summary of significant (P < 0.05) RNA expression changes of more than 1.5 fold between PC and non-malignant samples.

TABLE 3
Bisufite sequencing data summary.

[chemical structure]

[chemical structure]

[chemical structure]

% meth all seq: Frequency of methylated CpG sites in all sites assayed in all sequences.
% meth most meth seq: Frequency of methylated CpG sites in most methylated sequence in each sample.
Light grey: 0-20% methylation.
Light-medium dark grey: 20-50% methylation.
Medium dark-dark grey: 50-80% methylation.
Dark grey: 80-100% methylation.

TABLE 4
ROC curve analysis of non-malignant samples (ADJ-N and BPH) against
clinically localized cancer samples (RP)

| | | | Sensitivity | Specificity |
|---|---|---|---|---|
| Gene | AUC (95% CI) | Cutpoint | (95% CI) | (95% CI) |
| AOX 1 | 0.919 | 0.542 | 0.952 | 0.636 |
| | (0.875-0.962) | | (0.921-0.974) | (0.451-0.796) |
| | | 1.246 | 0.713 | 0.970 (fixed) |
| | | | (0.658-0.764) | (0.842-0.999) |
| C1orf114 | 0.892 | 0.0001 | 0.860 | 0.697 |
| | (0.856-0.929) | | (0.815-0.898) | (0.513-0.844) |
| | | 0.104 | 0.775 | 0.970 (fixed) |
| | | | (0.723-0.821) | (0.842-0.999) |
| GAS6 | 0.980 | 0.111 | 0.969 | 0.909 |
| | (0.966-0.994) | | (0.942-0.986) | (0.757-0.981) |
| | | 0.288 | 0.932 | 0.970 (fixed) |
| | | | (0.897-0.958) | (0.842-0.999) |
| HAPLN3 | 0.928 | 0.006 | 0.932 | 0.758 |
| | (0.895-0.960) | | (0.897-0.958) | (0.577-0.889) |
| | | 0.266 | 0.710 | 0.970 (fixed) |
| | | | (0.654-0.761) | (0.842-0.999) |

CI: confidence interval

TABLE 5

| | Cohort 1 | | Cohort 2 | |
|---|---|---|---|---|
| PC samples | (n = 293) | | (n = 114) | |
| Median age (range) | 63 | (46-73) | 63 | (47-75) |
| Pathological Gleason score, n (%) | | | | |
| 3-6 | 113 | (38.6) | 48 | (42.1) |
| 7 | 143 | (48.8) | 42 | (36.8) |
| 8-10 | 36 | (12.3) | 20 | (17.5) |
| Unknown | 1 | (0.3) | 4 | (3.5) |
| Pathological T stage, n (%) | | | | |
| T1 | 0 | (0.0) | 0 | (0.0) |
| T2a-c | 184 | (62.8) | 68 | (59.6) |
| T3a-b | 106 | (36.2) | 46 | (40.4) |
| T4 | 3 | (1.0) | 0 | (0.0) |
| Unknown | 0 | (0.0) | 0 | (0.0) |
| PSA at diagnosis, n (%) | | | | |
| ≦10 ng/mL | 114 | (38.9) | 66 | (57.9) |
| >10 ng/mL | 178 | (60.8) | 46 | (40.4) |
| Unknown | 1 | (0.3) | 2 | (1.8) |
| Nodal status, n (%) | | | | |
| pN0 | 253 | (86.3) | 40 | (35.2) |
| pN1 | 5 | (1.7) | 1 | (0.9) |
| Unknown | 35 | (11.9) | 73 | (64.0) |
| Surgical margin status, n (%) | | | | |
| Negative | 196 | (66.9) | 32 | (28.1) |
| Positive | 93 | (31.7) | 15 | (13.2) |
| Unknown | 4 | (1.4) | 67 | (58.8) |
| Recurrence status, n (%) | | | | |
| No recurrence | 170 | (58.0) | 58 | (50.9) |
| Recurrence | 123 | (42.0) | 56 | (49.1) |
| Mean follow-up time, months | 49 | (2-151) | 70 | (1-181) |
| (range) | | | | |
| Non-malignant samples | ADJ-N (n = 18) | | BPH (n = 15) | |
| Median Age (range) | 62 | (56-72) | 70 | (56-83) |

TABLE 6
Clinicopathological data for all non-RP samples in cohort 1

| | ADJ-N | BPH | PIN | MPC | CRPC |
|---|---|---|---|---|---|
| | n = 18 | n = 15 | n = 11 | n = 17 | n = 28 |
| Median Age | 62 | 70 (56-83) | 63 (54-68) | 71 (52-89) | 73 (49-86) |
| (range) | (56-72) | | | | |
| Gleason | | | | | |
| score, n (%) | | | | | |
| 3-6 | NA | NA | NA | 2 (11.8) | 0 (0.0) |
| 7 | NA | NA | NA | 4 (23.5) | 2 (7.1) |
| 8-10 | NA | NA | NA | 11 (64.7) | 26 (92.9) |
| Unknown | NA | NA | NA | 0 | 0 (0.0) |
| PSA at | | | | | |
| diagnosis, | | | | | |
| n (%) | | | | | |
| ≦10 ng/mL | NA | NA | NA | 2 (11.8) | 1 (3.6) |
| >10 ng/mL | NA | NA | NA | 15 (88.2) | 9 (32.1) |
| Unknown | NA | NA | NA | 0 | 18 (64.3) |

NA: data not applicable.

TABLE 7
Correlation of methylation levels to clinicopathological parameters in
cohort 1 and 2.

| | Co- | | | | |
|---|---|---|---|---|---|
| Gene | hort | AOX 1 | C1orf114 | GAS6 | HAPLN3 |
| Age | 1 | 0.7741 | 0.2574 | 0.9465 | 0.8847 |
| dichotomized | 2 | 0.4904 | 0.6532 | 0.9293 | 0.9612 |
| (≦median<) | | | | | |
| Mann-Whitney | | | | | |
| P-value | | | | | |
| Gleason score | 1 | 0.0003* | 0.3712 | 0.0175* | 0.0018* |
| dichotomized | 2 | 0.0794 | 0.1430 | 0.6383 | 0.4262 |
| (≦6<) Mann- | | | | | |
| Whitney | | | | | |
| P-value | | | | | |
| T-stage | 1 | 0.0010* | <0.0001* | 0.0186* | 0.0649 |
| dichotomized | 2 | 0.0225* | 0.0190* | 0.0308* | 0.0069* |
| (≦2<) Mann- | | | | | |
| Whitney | | | | | |
| P-value | | | | | |
| PSA | 1 | 0.1635 | 0.3133 | 0.1455 | 0.0614 |
| Spearman's rho | | (0.0051)* | (<0.0001)* | (0.0128)* | (0.2959) |
| (P-value) | 2 | 0.0487 | 0.1052 | 0.1166 | 0.1431 |
| | | (0.6102) | (0.2694) | (0.2209) | (0.1324) |

Association of methylation markers with clinicopathological parameters.
*High methylation correlated positively with high Gleason score/T-stage/pre-operative PSA/Recurrence/positive resection margins.
¹Only samples with recurrence/no recurrence within 48 months included.
ND: Data not available.

TABLE 8
Uni- and multivariate analysis of methylation markers as continuous
variables in cohort 1 (training)

| | | Univariate analysis | | | Multivariate analysis | | |
|---|---|---|---|---|---|---|---|
| Variable | Characteristic | HR (95% CI) | P > \|z\| | Corr P | HR (95% CI) | P > \|z\| | Corr P |
| AOX1 | Cont. | 1.247 (1.002-1.552) | 0.048 | 0.192 | — | — | — |
| C1orf114 | Cont. | 4.737 (2.999-7.481) | <0.001 | <0.001 | 3.046 (1.819-5.101) | <0.001 | <0.001 |
| GAS6 | Cont. | 1.244 (0.842-1.840) | 0.273 | 0.273 | — | — | — |
| GSTP1 | Cont. | 1.670 (0.694-4.018) | 0.253 | 0.273 | — | — | — |
| HAPLN3 | Cont. | 1.617 (1.051-2.487) | 0.029 | 0.145 | — | — | — |
| KLF8 | Cont. | 1.710 (1.196-2.444) | 0.003 | 0.018 | 0.928 (0.576-1.495) | 0.758 | 0.758 |
| MOB3B | Cont. | 1.351 (0.793-2.303) | 0.268 | 0.273 | — | — | — |
| Preop. PSA | Cont. | 1.045 (1.032-1.058) | <0.001 | | | | |
| Tumor stage | pT2_{a-c} vs pT3ₐ₋ | 3.389 (2.353-4.880) | <0.001 | | | | |
| Gleason score | 5-6 vs 7-9 | 2.443 (1.583-3.772) | <0.001 | | | | |
| Surgical margin | Neg. vs pos. | 2.968 (2.062-4.272) | <0.001 | | | | |
| Nodal status | Neg. vs pos. | 3.293 (1.340-8.093) | 0.009 | | | | |

HR: Hazard ratio,
CI: Confidence Interval,
Corr P: P-value corrected according to Hochberg.
Multivariate analysis: Individual methylation markers analyzed in multivariate analysis including Preop. PSA, Tumor stage, Gleason score, Surgical margin, and Nodal status.

TABLE 9
Uni- and multivariate cox regression analysis of time to biochemical recurrence.

| | | Univariate | | | | Multivariate | | | | |
|---|---|---|---|---|---|---|---|---|---|---|
| Variable | Characteristics | HR (95% CI) | P > \|z\| | Corr P | AUC | HR (95% CI) | P > \|z\| | Corr P | AUC | |
| Cohort 1 | | | | | | | | | | |
| C1orf114 | Cont. | 4.74 (3.00-7.48) | <0.001 | <0.001 | 0.73 | 3.10 (1.89-5.09) | <0.001 | <0.001 | 0.845 | 0.833 |
| Preop. PSA | Cont. | 1.04 (1.03-1.06) | <0.001 | | 0.76 | 0.04 (1.02-1.05) | <0.001 | | 0.824 | 0.816 |
| Tumor stage | pT2_{a-c} vs pT3_{a-b} | 3.39 (2.35-4.88) | <0.001 | | 0.70 | 1.74 (1.12-2.71) | 0.014 | | | |
| Gleason sum | 5-6 vs 7-9 | 2.44 (1.58-3.77) | <0.001 | | 0.63 | 1.77 (1.13-2.77) | 0.013 | | | |
| Surgical margin | Neg. vs pos. | 2.97 (2.06-4.27) | <0.001 | | 0.67 | 2.18 (1.42-3.35) | <0.001 | | | |
| Nodal status | Neg. vs pos. | 3.29 (1.34-8.09) | 0.009 | | 0.52 | — | — | | | |
| Cohort 2 | | | | | | | | | | |
| C1orf114 | Cont. | 5.37 (1.99-14.5) | 0.001 | 0.004 | 0.74 | 3.27 (1.17-9.12) | 0.024 | 0.024 | 0.875 | 0.911 |
| Preop. PSA | Cont. | 1.02 (1.00-1.04) | 0.024 | | 0.69 | 1.03 (1.01-1.05) | 0.002 | | 0.863 | 0.899 |
| Tumor stage | pT2_{a-c} vs pT3_{a-b} | 3.81 (2.20-6.61) | <0.001 | | 0.78 | 3.52 (1.96-6.33) | <0.001 | | | |
| Gleason score | 5-6 vs 7-9 | 2.90 (1.58-5.32) | 0.001 | | 0.73 | 3.04 (1.62-5.72) | 0.001 | | | |
| Surgical margin | Neg. vs pos. | 2.08 (0.77-5.62) | 0.150 | | 0.61 | — | — | | | |
| Nodal status | Neg. vs pos. | — | — | | — | — | — | | | |
| Cohort 1 | | | | | | | | | | |
| AO/C1/HA | low vs high meth | 2.58 (1.79-3.71) | <0.001 | | 0.69 | 1.91 (1.26-2.90) | 0.002 | 0.016 | 0.836 | 0.828 |
| Preop. PSA | Cont. | 1.04 (1.03-1.06) | <0.001 | | 0.76 | 1.04 (1.03-1.06) | <0.001 | | 0.824 | 0.816 |
| Tumor stage | pT2_{a-c} vs pT3_{a-b} | 3.39 (2.35-4.88) | <0.001 | | 0.70 | 1.99 (1.27-3.11) | 0.003 | | | |
| Gleason sum | 5-6 vs 7-9 | 2.44 (1.58-3.77) | <0.001 | | 0.63 | 1.50 (0.94-2.39) | 0.093 | | | |
| Surgical margin | Neg. vs pos. | 2.97 (2.06-4.27) | <0.001 | | 0.67 | 1.69 (1.09-2.63) | 0.019 | | | |
| Nodal status | Neg. vs pos. | 3.29 (1.34-8.09) | 0.009 | | 0.52 | 1.61 (0.57-4.53) | 0.368 | | | |
| Cohort 2 | | | | | | | | | | |
| AO/C1/HA | low vs high meth | 2.64 (1.55-4.51) | <0.001 | | 0.70 | 2.33 (1.31-4.13) | 0.004 | 0.004 | 0.869 | 0.906 |
| Preop. PSA | Cont. | 1.02 (1.00-1.04) | 0.024 | | 0.69 | 1.03 (1.01-1.05) | 0.001 | | 0.863 | 0.899 |
| Tumor stage | pT2_{a-c} vs pT3_{a-b} | 3.81 (2.20-6.61) | <0.001 | | 0.78 | 3.76 (2.09-6.74) | <0.001 | | | |
| Gleason score | 5-6 vs 7-9 | 2.90 (1.58-5.32) | 0.001 | | 0.73 | 3.03 (1.61-5.73) | 0.001 | | | |
| Surgical margin | Neg. vs pos. | 2.08 (0.77-5.62) | 0.150 | | 0.61 | — | — | | | |
| Nodal status | Neg. vs pos. | — | — | | — | — | — | | | |

HR: Hazard Ratio,
CI: Confidence Interval of HRs,
P > |z|: P-value of uni- or multivariate cox regression analysis,
Corr P: Hochberg corrected P-value.
AUC: Area under the curve calculated using recurrence status after 36 months follow-up.
AO/C1/HA: AOX1/C1orf114/HAPLN3. For cohort 2 lymph node status was not included as only one patient had cancer positive lymph nodes.

TABLE 10
Uni- and multivariate analysis of methylation markers as continuous
variables in cohort 2 (validation)

| | | Univariate analysis | | | Multivariate analysis | | |
|---|---|---|---|---|---|---|---|
| Variable | Characteristics | HR (95% CI) | P > \|z\| | Corr P | HR (95% CI) | P > \|z\| | Corr P |
| C1orf114 | Cont. | 5.370 (1.988-14.505) | 0.001 | 0.002 | 3.267 (1.170-9.122) | 0.024 | 0.024 |
| KLF8 | Cont. | 3.308 (1.495-7.320) | 0.003 | 0.003 | 3.089 (1.271-7.508) | 0.013 | 0.026 |
| Preop. PSA | Cont. | 1.019 (1.002-1.036) | 0.024 | | | | |
| Tumor stage | pT2_{a-c} vs pT3_{a-b} | 3.813 (2.201-6.608) | <0.001 | | | | |
| Gleason score | 5-6 vs 7-9 | 2.900 (1.583-5.315) | 0.001 | | | | |
| Surgical margin | Neg. vs pos. | 2.077 (0.768-5.617) | 0.150 | | | | |

HR: Hazard ratio,
CI: Confidence Interval,
Corr P: P-value corrected according to Hochberg.
Multivariate analysis: Individual methylation markers analyzed in multivariate analysis including Preop. PSA, Tumor stage, and Gleason score. Lymph node status was not included as only one patient had cancer positive lymph nodes in cohort 2.

TABLE 11
Uni- and multivariate cox regression analysis of dichotomized methylation markers in cohort 1 (training)

| | | | | | | | | | Multivariate analysis | | | |
|---|---|---|---|---|---|---|---|---|---|---|---|---|
| | | Univariate analysis | | | | Multivariate analysis | | | including C1orf114 | | | |
| Variable | Characteristics | HR (95% CI) | P > \|z\| | Corr P | AUC | HR (95% CI) | P > \|z\| | Corr P | HR (95% CI) | P > \|z\| | AUC | |
| AOX1 | low vs high | 1.69 (1.11- [symbol] | 0.015 | 0.015 | 0.60 | 1.40 (0.88-2.21) | 0.151 | 0.314 | — | — | | |
| | [symbol] | | | | | | | | | | | |
| C1orf114 | low vs high | 2.77 (1.93- [symbol] | <0.001 | <0.001 | 0.67 | 1.97 (1.31-2.94) | 0.001 | 0.004 | 1.97 (1.31- [symbol] | 0.001 | 0.842 | 0.833 |
| | [symbol] | | | | | | | | | | | |
| HAPLN3 | low vs high | 1.83 (1.18- [symbol] | 0.007 | 0.014 | 0.58 | 1.40 (0.85-2.29) | 0.184 | 0.314 | — | — | | |
| | [symbol] | | | | | | | | | | | |
| KLF8 | low vs high | 2.16 (1.35- [symbol] | 0.001 | 0.003 | 0.57 | 1.32 (0.77-2.24) | 0.314 | 0.314 | — | — | | |
| | [symbol] | | | | | | | | | | | |
| Preop. | Cont. | 1.05 (1.03- [symbol] | <0.001 | — | | | | | 1.04 (1.02- [symbol] | <0.001 | 0.824 | 0.816 |
| PSA | | | | | | | | | | | | |
| Tumor | pT2_{a-c} vs | 3.39 (2.35- [symbol] | <0.001 | — | | | | | 1.84 (1.16- [symbol] | 0.010 | | |
| stage | pT3_{a-b} | | | | | | | | | | | |
| Gleason | 5-6 vs 7-9 | 2.44 (1.58- [symbol] | <0.001 | — | | | | | 1.64 (1.03- [symbol] | 0.037 | | |
| score | | | | | | | | | | | | |
| Surgical | Neg. vs pos. | 2.97 (2.06- [symbol] | <0.001 | — | | | | | 1.96 (1.26- [symbol] | 0.003 | | |
| [symbol] | | | | | | | | | | | | |
| Nodal | Neg. vs pos. | 3.29 (1.34- [symbol] | 0.009 | — | | | | | 1.52 (0.54- [symbol] | 0.432 | | |
| status | | | | | | | | | | | | |

HR: Hazard ratio,
CI: Confidence Interval,
Corr P: P-value corrected according to Hochberg.
Multivariate analysis: Individual methylation markers analyzed in multivariate analysis including Preop. PSA, Tumor stage, Gleason score, Surgical margin, and Nodal status. [symbol]
indicates data missing or illegible when filed

TABLE 12
Uni- and multivariate cox regression analysis of dichotomized methylation markers in cohort 2 (validation)

| | | | | | | Multivariate analysis | | | |
|---|---|---|---|---|---|---|---|---|---|
| | | Univariate analysis | | | | including C1orf114 | | | |
| Variable | Characteristics | HR (95% CI) | P > \|z\| | Corr P | AUC | HR (95% CI) | P > \|z\| | AUC | |
| AOX1 | low vs high meth | 1.732 (0.912-3.287) | 0.093 | 0.212 | 0.61 | — | — | | |
| C1orf114 | low vs high meth | 2.105 (1.212-3.656) | 0.008 | 0.032 | 0.60 | 1.816 (1.006-3.279) | 0.048 | 0.857 | 0.900 |
| HAPLN3 | low vs high meth | 1.727 (0.890-3.353) | 0.106 | 0.212 | 0.58 | — | — | | |
| KLF8 | low vs high meth | 1.444 (0.652-3.196) | 0.365 | 0.365 | 0.55 | — | — | | |
| Preop. PSA | Cont. | 1.019 (1.002-1.036) | 0.024 | — | | 1.031 (1.012-1.051) | 0.002 | 0.863 | 0.899 |
| Tumor stage | pT2_{a-c} vs pT3_{a-b} | 3.813 (2.201-6.608) | <0.001 | — | | 3.775 (2.106-6.767) | <0.001 | | |
| Gleason score | 5-6 vs 7-9 | 2.900 (1.583-5.315) | 0.001 | — | | 3.041 (1.614-5.731) | 0.001 | | |
| Surgical margin | Neg. vs pos. | 2.077 (0.768-5.617) | 0.150 | — | | — | — | | |

HR: Hazard ratio,
CI: Confidence Interval,
Corr P: P-value corrected according to Hochberg.
Multivariate analysis: Individual methylation markers analyzed in multivariate analysis including Preop. PSA, Tumor stage, and Gleason score. Lymph node status was not included as only one patient had cancer positive lymph nodes in cohort 2.

TABLE 13
Uni-and multivariate cox regression analysis of combinations of
dichotomized methylation markers in cohort 1 (traning)

| | | Multivariate analysis | | |
|---|---|---|---|---|
| Variable | Characteristics | HR (95% CI) | P > \|z\| | Corr P |
| AO/C1 | low vs high meth | 2.01 (1.34-3.03) | 0.001 | 0.009 |
| AO/HA | low vs high meth | 1.25 (0.81-1.95) | 0.314 | 0.722 |
| AO/KL | low vs high meth | 1.10 (0.70-1.72) | 0.682 | 0.722 |
| C1/HA | low vs high meth | 2.11 (1.40-3.17) | <0.001 | <0.001 |
| C1/KL | low vs high meth | 2.01 (1.33-3.04) | 0.001 | 0.009 |
| HA/KL | low vs high meth | 1.22 (0.77-1.93) | 0.400 | 0.722 |
| AO/C1/HA | low vs high meth | 1.91 (1.26-2.90) | 0.002 | 0.016 |
| AO/C1/KL | low vs high meth | 1.74 (1.15-2.64) | 0.009 | 0.054 |
| AO/HA/KL | low vs high meth | 1.08 (0.70-1.67) | 0.722 | 0.722 |
| C1/HA/KL | low vs high meth | 1.91 (1.25-2.91) | 0.003 | 0.021 |
| AO/C1/HA/KL | low vs high meth | 1.70 (1.11-2.60) | 0.015 | 0.075 |

HR: Hazard ratio,
CI: Confidence Interval,
Corr P: P-value corrected according to Hochberg.
Multivariate analysis: Individual methylation markers analyzed in multivariate analysis including Preop. PSA, Tumor stage, Gleason score, Surgical margin, and Nodal status.
AO: AOX1,
C1: C1orf114,
HA: HAPLN3,
KL: KLF8.
Models significant after correction for multiple testing (Hochberg) in bold.

TABLE 14
Uni- and multivariate cox regression analysis of the C1orf114/HAPLN3
gene combination in cohort 1 (training) and cohort 2 (validation)

| | | | Univariate analysis | | | Multivariate analysis | | | | |
|---|---|---|---|---|---|---|---|---|---|---|
| | Variable | Characteristics | HR (95% CI) | P > \|z\| | AUC | HR (95% CI) | P > \|z\| | Corr P | AUC | |
| Cohort 1 | C1/HA | low vs high meth | 2.91 (2.03-4.17) | <0.001 | 0.70 | 2.11 (1.40-3.17) | <0.001 | <0.001 | 0.840 | 0.832 |
| | Preop. PSA | Cont. | 1.05 (1.03-1.06) | <0.001 | 0.76 | 1.04 (1.03-1.06) | <0.001 | | 0.824 | 0.816 |
| | Tumor stage | pT2_{a-c} vs pT3_{a-b} | 3.39 (2.35-4.88) | <0.001 | 0.70 | 2.02 (1.29-3.15) | 0.002 | | | |
| | Gleason score | 5-6 vs 7-9 | 2.44 (1.58-3.77) | <0.001 | 0.63 | 1.54 (0.97-2.46) | 0.069 | | | |
| | Surgical margin | Neg. vs pos. | 2.97 (2.06-4.27) | <0.001 | 0.67 | 1.68 (1.08-2.59) | 0.021 | | | |
| | Nodal status | Neg. vs pos. | 3.29 (1.34-8.09) | 0.009 | 0.52 | 1.46 (0.52-4.14) | 0.471 | | | |
| Cohort 2 | C1/HA | low vs high meth | 2.53 (1.48-4.33) | 0.001 | 0.67 | 2.26 (1.27-4.01) | 0.005 | 0.005 | 0.863 | 0.906 |
| | Preop. PSA | Cont. | 1.02 (1.00-1.04) | 0.024 | 0.69 | 1.03 (1.01-1.05) | 0.002 | | 0.863 | 0.899 |
| | Tumor stage | pT2_{a-c} vs pT3_{a-b} | 3.81 (2.20-6.61) | <0.001 | 0.78 | 3.70 (2.06-6.62) | <0.001 | | | |
| | Gleason score | 5-6 vs 7-9 | 2.90 (1.58-5.32) | 0.001 | 0.73 | 3.14 (1.66-5.93) | <0.001 | | | |
| | Surgical margin | Neg. vs pos. | 2.08 (0.77-5.62) | 0.150 | 0.61 | — | — | | | |

HR: Hazard ratio,
CI: Confidence Interval,
Corr P: P-value corrected according to Hochberg.
Multivariate analysis: Individual methylation markers analyzed in multivariate analysis including Preop. PSA, Tumor stage, and Gleason score.
C1: C1orf114,
HA: HALN3. Lymph node status was not included as only one patient had cancer positive lymph nodes in cohort 2.

TABLE 15
Primer sequences used for amplification of chromatin
immunoprecipitated DNA

| | ChIP-qPCR primers | |
|---|---|---|
| Amplicon | Forward (pmol/reaction) | Reverse (pmol/reaction) |
| AOX1 | CTAAAGGCTGCGTTTTCAGG | CTTGTGAGCCTTGGAAGGAG |
| | (2 pmol) SEQ ID NO: 24 | (2 pmol) SEQ ID NO: 25 |
| C1 | GGGAGGGAGGGTAGGTAGTG | TTACCAGACTTCCCCACCAG |
| orf114 | (0.5 pmol) SEQ ID NO: 26 | (0.5 pmol) SEQ ID NO: 27 |
| COL2A1 | GCTCTTTTCCACCAGCTTTG | CTCGCGCTCTCTCTTTCCTA |
| | (0.5 pmol) SEQ ID NO: 28 | (0.5 pmol) SEQ ID NO: 29 |
| GAPDH | CTCTCTCCCATCCCTTCTCC | CCTAGTCCCAGGGCTTTGAT |
| | (1 pmol) SEQ ID NO: 30 | (1 pmol) SEQ ID NO: 31 |
| GAS6 | CAGTGGGATTGGATCTGACC | CCCGAATCTACTGCATCCTT |
| | (2 pmol) SEQ ID NO: 32 | (2 pmol) SEQ ID NO: 33 |
| HAPLN3 | ATCAGACTGCTGCCTTGGAC | CAAAGCGGTAAGGGAGGAAC |
| | (0.5 pmol) SEQ ID NO: 34 | (0.5 pmol) SEQ ID NO: 35 |
| KLF8 | TATCTCCTCGTGGGTTCCTG | TCCACCCATCCTCTGAACTC |
| | (1 pmol) SEQ ID NO: 36 | (1 pmol) SEQ ID NO: 37 |
| MOBKL2B | CCTGATCCTGAGGGAGGAGT | TTGTTGGCCCCAAAGTTAAG |
| | (1.5 pmol) SEQ ID NO: 38 | (1.5 pmol) SEQ ID NO: 39 |

Reaction setup was as follows: 5 μl total = 2.5 μl Power SYBR Green PCR Master mix (Applied Biosystems).
PCR program: 2 min 50° C., 10 min 95° C., 40×(15 s 95° C., 1 min 60° C.), 15 s 95° C., 15 s 60° C., 15 s 95° C.

TABLE 16
ROC analysis of benign and malignant prostate tissue
samples using methylation of both single genes and
multi-gene models

| | | Cut-point 1 (most | | | | | |
|---|---|---|---|---|---|---|---|
| | | patients correctly | | | Cut-point 2 (97% | | |
| | | classified) | | | specificity) | | |
| Single genes/multi- | | Cut- | | | Cut- | | |
| gene models | AUC | point | Sens. | Spec. | point | Sens. | Spec. |
| AOX1 | 0.919 | 0.542 | 0.952 | 0.636 | 1.246 | 0.713 | 0.970 |
| C1orf114 | 0.892 | 0.000 | 0.860 | 0.697 | 0.104 | 0.775 | 0.970 |
| GAS6 | 0.980 | 0.111 | 0.969 | 0.909 | 0.288 | 0.932 | 0.970 |
| HAPLN3 | 0.928 | 0.006 | 0.932 | 0.758 | 0.266 | 0.710 | 0.970 |
| ST6GALNAC3 | | | | | | | |
| ZNF660 | | | | | | | |
| AOX1 C1orf114 | 0.940 | 0.515 | 0.959 | 0.636 | 1.322 | 0.829 | 0.970 |
| AOX1 GAS6 | 0.959 | 0.512 | 0.969 | 0.606 | 1.279 | 0.894 | 0.970 |
| AOX1 HAPLN3 | 0.943 | 0.542 | 0.963 | 0.636 | 1.446 | 0.802 | 0.970 |
| AOX1 ST6GALNAC3 | | | | | | | |
| AOX1 ZNF660 | | | | | | | |
| C1orf114 GAS6 | 0.980 | 0.048 | 0.983 | 0.818 | 0.357 | 0.939 | 0.970 |
| C1orf114 HAPLN3 | 0.959 | 0.035 | 0.966 | 0.758 | 0.356 | 0.836 | 0.970 |
| C1orf114 | | | | | | | |
| ST6GALNAC3 | | | | | | | |
| C1orf114 ZNF660 | | | | | | | |
| GAS6 HAPLN3 | 0.980 | 0.100 | 0.976 | 0.849 | 0.385 | 0.939 | 0.970 |
| GAS6 ST6GALNAC3 | | | | | | | |
| GAS6 ZNF660 | | | | | | | |
| HAPLN3 | | | | | | | |
| ST6GALNAC3 | | | | | | | |
| HAPLN3 ZNF660 | | | | | | | |
| ST6GALNAC3 | | | | | | | |
| ZNF660 | | | | | | | |
| AOX1 C1orf114 | 0.963 | 0.731 | 0.956 | 0.758 | 1.650 | 0.864 | 0.970 |
| GAS6 | | | | | | | |
| AOX1 C1orf114 | 0.952 | 0.515 | 0.966 | 0.636 | 1.507 | 0.833 | 0.970 |
| HAPLN3 | | | | | | | |
| AOX1 C1orf114 | | | | | | | |
| ST6GALNAC3 | | | | | | | |
| AOX1 C1orf114 | | | | | | | |
| ZNF660 | | | | | | | |
| AOX1 GAS6 | 0.964 | 0.568 | 0.973 | 0.636 | 1.541 | 0.877 | 0.970 |
| HAPLN3 | | | | | | | |
| AOX1 GAS6 | | | | | | | |
| ST6GALNAC3 | | | | | | | |
| AOX1 GAS6 ZNF660 | | | | | | | |
| AOX1 HAPLN3 | | | | | | | |
| ST6GALNAC3 | | | | | | | |
| AOX1 HAPLN3 | | | | | | | |
| ZNF660 | | | | | | | |
| AOX1 ST6GALNAC3 | | | | | | | |
| ZNF660 | | | | | | | |
| C1orf114 GAS6 | 0.980 | 0.131 | 0.977 | 0.879 | 0.396 | 0.945 | 0.970 |
| HAPLN3 | | | | | | | |
| C1orf114 GAS6 | | | | | | | |
| ST6GALNAC3 | | | | | | | |
| C1orf114 GAS6 | | | | | | | |
| ZNF660 | | | | | | | |
| C1orf114 HAPLN3 | | | | | | | |
| ST6GALNAC3 | | | | | | | |
| C1orf114 HAPLN3 | | | | | | | |
| ZNF660 | | | | | | | |
| C1orf114 | | | | | | | |
| ST6GALNAC3 | | | | | | | |
| ZNF660 | | | | | | | |
| GAS6 HAPLN3 | | | | | | | |
| ST6GALNAC3 | | | | | | | |
| GAS6 HAPLN3 | | | | | | | |
| ZNF660 | | | | | | | |
| GAS6 ST6GALNAC3 | | | | | | | |
| ZNF660 | | | | | | | |
| HAPLN3 | | | | | | | |
| ST6GALNAC3 | | | | | | | |
| ZNF660 | | | | | | | |
| AOX1 C1orf114 | 0.966 | 0.690 | 0.963 | 0.697 | 1.753 | 0.877 | 0.970 |
| GAS6 HAPLN3 | | | | | | | |
| AOX1 C1orf114 | | | | | | | |
| GAS6 ST6GALNAC3 | | | | | | | |
| AOX1 C1orf114 | | | | | | | |
| GAS6 ZNF660 | | | | | | | |
| AOX1 C1orf114 | | | | | | | |
| HAPLN3 | | | | | | | |
| ST6GALNAC3 | | | | | | | |
| AOX1 C1orf114 | | | | | | | |
| HAPLN3 ZNF660 | | | | | | | |
| AOX1 C1orf114 | | | | | | | |
| ST6GALNAC3 | | | | | | | |
| ZNF660 | | | | | | | |
| AOX1 GAS6 | | | | | | | |
| HAPLN3 | | | | | | | |
| ST6GALNAC3 | | | | | | | |
| AOX1 GAS6 | | | | | | | |
| HAPLN3 ZNF660 | | | | | | | |
| AOX1 GAS6 | | | | | | | |
| ST6GALNAC3 | | | | | | | |
| ZNF660 | | | | | | | |
| AOX1 HAPLN3 | | | | | | | |
| ST6GALNAC3 | | | | | | | |
| ZNF660 | | | | | | | |
| C1orf114 GAS6 | | | | | | | |
| HAPLN3 | | | | | | | |
| ST6GALNAC3 | | | | | | | |
| C1orf114 GAS6 | | | | | | | |
| HAPLN3 ZNF660 | | | | | | | |
| C1orf114 GAS6 | | | | | | | |
| ST6GALNAC3 | | | | | | | |
| ZNF660 | | | | | | | |
| C1orf114 HAPLN3 | | | | | | | |
| ST6GALNAC3 | | | | | | | |
| ZNF660 | | | | | | | |
| GAS6 HAPLN3 | | | | | | | |
| ST6GALNAC3 | | | | | | | |
| ZNF660 | | | | | | | |
| AOX1 C1orf114 | | | | | | | |
| GAS6 | | | | | | | |
| HAPLN3 | | | | | | | |
| ST6GALNAC3 | | | | | | | |
| AOX1 C1orf114 | | | | | | | |
| GAS6 | | | | | | | |
| HAPLN3 ZNF660 | | | | | | | |
| AOX1 C1orf114 | | | | | | | |
| GAS6 | | | | | | | |
| ST6GALNAC3 | | | | | | | |
| ZNF660 | | | | | | | |
| AOX1 C1orf114 | | | | | | | |
| HAPLN3 | | | | | | | |
| ST6GALNAC3 | | | | | | | |
| ZNF660 | | | | | | | |
| AOX1 GAS6 | | | | | | | |
| HAPLN3 | | | | | | | |
| ST6GALNAC3 | | | | | | | |
| ZNF660 | | | | | | | |
| C1orf114 GAS6 | | | | | | | |
| HAPLN3 | | | | | | | |
| ST6GALNAC3 | | | | | | | |
| ZNF660 | | | | | | | |
| AOX1 C1orf114 | | | | | | | |
| GAS6 | | | | | | | |
| HAPLN3 | | | | | | | |
| ST6GALNAC3 | | | | | | | |
| ZNF660 | | | | | | | |

AUC: Area under the curve of receiver operating characteristic (ROC) analysis of 35 benign prostate tissue samples versus 293 prostate cancer samples.
Sens: sensitivity of methylation for prostate cancer at given cut-point.
Spec: specificity of methylation for prostate cancer at given cut-point. Combinations of genes were generated by adding methylation values for each individual gene.

TABLE 17
Single genes and multi-gene models in uni- and multivariate cox
regression analysis of time to PSA recurrence after radical prostatectomy.

| | Cohort 1 | | Cohort 2 | |
|---|---|---|---|---|
| | Univariate | Multivariate | Univariate | Multivariate |
| Single genes/multi-gene | hazard ratio | hazard ratio | hazard ratio | hazard ratio |
| models | (95% CI) | (95% CI) | (95% CI) | (95% CI) |
| AOX1 | 1.68 (1.11-2.58) | 1.40 (0.88-2.21) | 2.10 (1.24-3.55) | 1.79 (0.96-3.34) |
| C1orf114 | 2.77 (1.93-3.98) | 1.96 (1.31-2.94) | 2.01 (1.23-3.29) | 2.10 (1.21-3.66) |
| GAS6 | 1.87 (1.03-3.27) | 1.19 (0.64-2.20) | 1.35 (0.62-2.94) | 1.40 (0.56-3.52) |
| HAPLN3 | 1.83 (1.18-2.83) | 1.40 (0.85-2.29) | 1.98 (1.11-3.51) | 1.73 (0.89-3.35) |
| ST6GALNAC3 | | | | |
| ZNF660 | | | | |
| AOX1 C1orf114 | 2.71 (1.89-3.89) | 2.01 (1.34-3.03) | 2.39 (1.49-3.84) | 2.13 (1.24-3.65) |
| AOX1 GAS6 | 1.75 (1.16-2.62) | 1.42 (0.91-2.20) | 1.82 (1.07-3.09) | 1.70 (0.93-3.12) |
| AOX1 HAPLN3 | 1.56 (1.05-2.31) | 1.25 (0.81-1.95) | 2.56 (1.58-4.16) | 2.24 (1.29-3.89) |
| AOX1 ST6GALNAC3 | | | | |
| AOX1 ZNF660 | | | | |
| C1orf114 GAS6 | 2.63 (1.84-3.77) | 1.82 (1.21-2.72) | 2.18 (1.34-3.54) | 2.23 (1.29-3.86) |
| C1orf114 HAPLN3 | 2.91 (2.03-4.17) | 2.11 (1.40-3.17) | 2.59 (1.60-4.18) | 2.53 (1.48-4.33) |
| C1orf114 ST6GALNAC3 | | | | |
| C1orf114 ZNF660 | | | | |
| GAS6 HAPLN3 | 1.67 (1.11-2.53) | 1.23 (0.77-1.95) | 2.16 (1.27-3.67) | 2.01 (1.07-3.76) |
| GAS6 ST6GALNAC3 | | | | |
| GAS6 ZNF660 | | | | |
| HAPLN3 ST6GALNAC3 | | | | |
| HAPLN3 ZNF660 | | | | |
| ST6GALNAC3 ZNF660 | | | | |
| AOX1 C1orf114 GAS6 | 2.66 (1.85-3.81) | 2.01 (1.34-3.03) | 2.39 (1.49-3.84) | 2.13 (1.24-3.65) |
| AOX1 C1orf114 HAPLN3 | 2.58 (1.79-3.71) | 1.91 (1.26-2.90) | 2.85 (1.77-4.58) | 2.64 (1.55-4.51) |
| AOX1 C1orf114 | | | | |
| ST6GALNAC3 | | | | |
| AOX1 C1orf114 ZNF660 | | | | |
| AOX1 GAS6 HAPLN3 | 1.54 (1.04-0.66) | 1.25 (0.81-1.91) | 2.41 (1.49-3.91) | 2.24 (1.29-3.89) |
| AOX1 GAS6 | | | | |
| ST6GALNAC3 | | | | |
| AOX1 GAS6 ZNF660 | | | | |
| AOX1 HAPLN3 | | | | |
| ST6GALNAC3 | | | | |
| AOX1 HAPLN3 ZNF660 | | | | |
| AOX1 ST6GALNAC3 | | | | |
| ZNF660 | | | | |
| C1orf114 GAS6 HAPLN3 | 2.75 (1.91-3.94) | 2.01 (1.33-3.04) | 2.71 (1.68-4.38) | 2.68 (1.57-5.48) |
| C1orf114 GAS6 | | | | |
| ST6GALNAC3 | | | | |
| C1orf114 GAS6 ZNF660 | | | | |
| C1orf114 HAPLN3 | | | | |
| ST6GALNAC3 | | | | |
| C1orf114 HAPLN3 | | | | |
| ZNF660 | | | | |
| C1orf114 ST6GALNAC3 | | | | |
| ZNF660 | | | | |
| GAS6 HAPLN3 | | | | |
| ST6GALNAC3 | | | | |
| GAS6 HAPLN3 ZNF660 | | | | |
| GAS6 ST6GALNAC3 | | | | |
| ZNF660 | | | | |
| HAPLN3 ST6GALNAC3 | | | | |
| ZNF660 | | | | |
| AOX1 C1orf114 GAS6 | 2.53 (1.76-3.64) | 1.91 (1.26-2.90) | 2.85 (1.77-4.58) | 2.64 (1.55-4.51) |
| HAPLN3 | | | | |
| AOX1 C1orf114 GAS6 | | | | |
| ST6GALNAC3 | | | | |
| AOX1 C1orf114 GAS6 | | | | |
| ZNF660 | | | | |
| AOX1 C1orf114 HAPLN3 | | | | |
| ST6GALNAC3 | | | | |
| AOX1 C1orf114 HAPLN3 | | | | |
| ZNF660 | | | | |
| AOX1 C1orf114 | | | | |
| ST6GALNAC3 ZNF660 | | | | |
| AOX1 GAS6 HAPLN3 | | | | |
| ST6GALNAC3 | | | | |
| AOX1 GAS6 HAPLN3 | | | | |
| ZNF660 | | | | |
| AOX1 GAS6 | | | | |
| ST6GALNAC3 ZNF660 | | | | |
| AOX1 HAPLN3 | | | | |
| ST6GALNAC3 ZNF660 | | | | |
| C1orf114 GAS6 HAPLN3 | | | | |
| ST6GALNAC3 | | | | |
| C1orf114 GAS6 HAPLN3 | | | | |
| ZNF660 | | | | |
| C1orf114 GAS6 | | | | |
| ST6GALNAC3 ZNF660 | | | | |
| C1orf114 HAPLN3 | | | | |
| ST6GALNAC3 ZNF660 | | | | |
| GAS6 HAPLN3 | | | | |
| ST6GALNAC3 ZNF660 | | | | |
| AOX1 C1orf114 GAS6 | | | | |
| HAPLN3 ST6GALNAC3 | | | | |
| AOX1 C1orf114 GAS6 | | | | |
| HAPLN3 ZNF660 | | | | |
| AOX1 C1orf114 GAS6 | | | | |
| ST6GALNAC3 ZNF660 | | | | |
| AOX1 C1orf114 HAPLN3 | | | | |
| ST6GALNAC3 ZNF660 | | | | |
| AOX1 GAS6 HAPLN3 | | | | |
| ST6GALNAC3 ZNF660 | | | | |
| C1orf114 GAS6 HAPLN3 | | | | |
| ST6GALNAC3 ZNF660 | | | | |
| AOX1 C1orf114 GAS6 | | | | |
| HAPLN3 ST6GALNAC3 | | | | |
| ZNF660 | | | | |

Multi-gene models: For each gene, cohort 1 patients were dichotomized into high and low methylation groups by ROC analysis of recurrence/non-recurrence status at 36 months follow-up. For multi-gene models, patients were included in the high methylation group if at least one gene was annotated as highly methylated by ROC analysis. Cohort 2 patients were dichotomized on the basis of cut-offs (fractions) defined in cohort 1.
CI: confidence interval.

TABLE 18
Primer and probe sequences of bisulfite sequencing and qMSP assays.

| | Bisulfite sequencing primers | | qMSP primers and probes | | | |
|---|---|---|---|---|---|---|
| | | | | | | Reac. |
| | | | | Antisense | | Vol. |
| | Sense | Antisense | Sense (pmol/ | (pmol/ | Probe (pmol/ | and |
| Gene | primer | primer | reaction) | reaction) | reaction) | Cond. |
| AOX1 | GGGAAGAGTTTT | ATAAAAACCCAA | TTTCGTAATAG | CAAAACAATCC | HEX_TCGTATTT | 5 μl³ |
| | TGGTAAAGAGTTT | AAATCCAAAACAA | CGGTTTTGT | CTAAAAACG | TTATTTTTGTTT | |
| | | | (6 pmol) | (6 pmol) | TCGGG_BHQ1 | |
| | | | | | (1 pmol) | |
| Cl orf | TTTTTATATTGAG | AAAAAAATTTCAC | ATTTGCGTAGG | CGTAAATTCCT | HEX_TCGGTGT | 5 μl⁴ |
| 114 | GTAAAGGAGATTT | AACCAACACAA | CGTATGTAA | TAATCGTCCC | TTGCGAAGGGT | |
| | | | (3 pmol) | (3 pmol) | TAG_BHQ1 | |
| | | | | | (1 pmol) | |
| GAS6 | GGTAGTAGGTTTA | CTATAAAATCAC | GGTTTCGTTTT | ATTCCTAACCG | FAM_GCGGGTG | 5 μl³ |
| | AAAATAAGATTTT | CCTAACTTCAAA | GTTAGGTGT | AAATACCG | TTTTTAGGAGTT | |
| | | | (3 pmol) | (3 pmol) | CG_BHQ1 | |
| | | | | | (1 pmol) | |
| HAPL | GATTTTGGTAGG | CCCAACCCTTAA | CTTTTCGTAGT | GAATTCCTCCC | HEX_TCGGATTT | 5 μl³ |
| N3 | AAGGGGGT | AAAAAAAAAATA | GTTCGGTTTAC | TTACCGC | TGTTCGGGAGG | |
| | | | (3 pmol) | (3 pmol) | T_BHQ1 (1 pmol) | |
| MYO | — | — | CCAACTCCAAA | TGGTTTTTTTA | FAM_TCCCTTC | 5 μl³ |
| D1 | | | TCCCCTCTCTA | GGGAGTAAGTT | CTATTCCTAAAT | |
| | | | T¹ (3 pmol) | TGTT² (3 pmol) | CCAACCTAAAT | |
| | | | | | ACCTCC_BHQ1¹ | |
| | | | | | (1 pmol) | |
| ST6G | GAAAGAAGTAGT | TTACCTTCAAAAT | — | — | — | — |
| ALNA | AGGTATTGAGGA | ACAAACCATAA | | | | |
| C3 | GT (1) | (1) | | | | |
| | TTTGTTTTTAGG | CATATTTCAAAAT | | | | |
| | ATTGTTTTTGATT | CTCCCTCCATAT | | | | |
| | T (2) | A (2) | | | | |
| ZNF6 | GGGTATAGAGAT | CCCAAAACAAAA | — | — | — | — |
| 60 | GTGGAAATTTT | AAACAACACTA | | | | |

Reac. Vol. and Cond.: Reaction volumes and conditions.
¹Primer/probe sequence from: Jeronimo, C., et al., Quantitation of GSTP1 methylation in non-neoplastic prostatic tissue and organ-confined prostate adenocarcinoma. J Natl Cancer lnst, 2001. 93(22): p. 1747-52.
²MYOD1 reverse primer was redesigned to produce a shorter amplicon.
³PCR program: 10 min 95° C., 50×(15 s 95° C., 1 min 56° C., 30 s 72° C.).
⁴PCR program: 10 min 95° C., 50×(15 s 95° C., 1 min 58° C., 30 s 72° C.), and for GSTP1 as previously described (Jeronimo, C., et al., Quantitation of GSTP1 methylation in non-neoplastic prostatic tissue and organ-confined prostate adenocarcinoma. J Natl Cancer lnst, 2001. 93(22): p. 1747-52).

The application's sequence listing, which the Patent Office published only in electronic form, follows.

SEQUENCE LISTING (39 sequences)

SEQ ID NO: 1 - DNA, 90487 bp, Homo sapiens
  misc_feature (1)..(90487): DNA nucleotide sequence of the entire AOX1 genomic locus including 5000-bp upstream sequence
aggtagatgaacctttctggttttttgtttttatttgtaaatctagttttattgcattttggtcagaaattatttattgtaatatttctgctttatggaaattgccagtattttctttgtgacctactataggatcagcatttataactgtgctgtgattgcttagatgtatattctccataatcaaggtctaaagtttgatatatatccatgagatttactgtatttattatgttgcttagatcttctgtttcttattttttgtaaataagtgatctgttttgtactaaggttatactaagagttgtatattaaaatctactgtgtcctgtgtttccatgtatctcctgtagtttttgcttcagaagggtggttgctctgctttttgctatgtaaatatcatgattattacttattcattttggattatggcctttattatattaaaaatgtcctcatttgtcatgttcagtgctctggactaaagacttaaagtctttaagatataaagactttaaaaacatatttatgagaccttcctgataactcctaccactcctatcttcaatacctatgatgatcattccataatagcaagcagctttaattaggatgtactttcatgggagctactagaagctgtgatatacctagtgtataccatttccaatccaaaaagaaggaagaaaaaaaagtggcaactggatggtcatcactcggaatttatactgaatgttgtggcttttgcttttaaaaattttaccaactaagctgtatagcaaatcatctgcatgcactgtacatttaaactaaaatagaaccttatttccttacagcattttgctgtgttttatttagaataggtacttcttttgaaaggattaattaaactctatctaattacccaaggcagtggtatcacactggctctgaagaggagtacgaaggagtgaaagagacctttccacctaatcttgtatacctttttaaatttgggaccatgtctatgtatttcatctaaaaaccacatttacacacatgcatgtaaaatataactaaactccataacttgaaacatgatgtattaggtgcaggaatctaccctcttactgaaaaaataaaattattgggtaaaatactaaaaaacataccttgaatgcatttcttaactaatgactattagccaaccaacatttcttttagtaggaaagtaagaaaagctcagatcaaagatcaaatgatagcaggaactcagaggggaactgaccttatcctgaagatatttgtctaactaggtgaacctaaacattgcattcacaaccctatggggctagggacagaagacaaatcctagggtttatccaaaataaatagtctaatagatcttcttccataaagttgatctactttctcagtaaaagagcaaactaaaaataacctccccactagcttgctcagccccaggaaataacttgggtgctgaattaaggaggaaaaaaatctttccttagaattcataaccaaaatacagcctttattgcagattatagctggaattcacaatatttcgaaggcaaaaaaaaagttaagctgaggatttagtataattagtgcatgaactatagtgctctgttgtctattagaagcaaatattttgtagggagttgtccatctcacacctcaacatgttttgcacagccaaagttccaaggaaaatgaagggctacctcatagtaaagaaaaacattacatacacaggggaacaaggtatcagcagaaacagcaatcagacacagaatataaaatgtttaatgtttcaataaaggagaggcttgaaaatgaatgaagatgttgagtggaaaaagtcacagaaaaacacctacagtacgattccatttatataaagatatctatcaaacagataaaaccaaacaatatactttgtgggagagcaatacacaaacgcttaaaacaaaactgtaaagaaaggagtgataatagaattcaggatagtggtccctttttgggggaggagagggttgtgatcagaaaggggcatattggaggtgtggtaatattttgtttcttaacctgggtgtaggaacatgagcatttactttgtttttaaatggtatattttcacatgttcttgaacatatgctaaatttctaacaaaaaggaactatgtaataaacatgtaatatataaaatctatgttgattaatttttcttaaatatttgaaatgaattatttgaagtactctgatagtgagaactataagatttaagaaaaattagagtatttcaagtatttaacaaagcttatggtttaaggaaacttcttttctactgatatgatgaaacaattttcttctccatgcttcacagcaaaagcattaattttgggttgttattaatcttcctttttttctactttgcagcaagatgagaagatgaagtgaatttatggattctggtttttctgaattttcaaagcataaggaatcaaaacagaaatatagtatcaagaagatgaaatgcttaatgaaaaggttttttttttgtttctttggcctttcatggagtgttgatttgtccattcttaatgtttattaataggtatatgtgcataaaatagctattttgtaacattaaactttttgagtcattttggtcatcatataacttaccttcctgtttatttaagcttctttttacctagtagcctttaaccaaacaataaccttttaaccaaataaaatgtgttaataaatacctttgcattggttatcttgtatactaggctgtcttgttttgctgtctgtttttaacccattcaatatatgtggacatccaaaagggtttaaaagccacctcctgccctggcccgttttctctcccttcattcttctgttttcagaaatacatgttgaatgtcagcttctgtattatttctattatatgtaatctgatgacttagaggaggagattaacctttcaggctcttttgaatttggtttttataatttggttttaaagatcacttactcttccagtaataagtagtaataaatcctgttcatatctgagatcaatacacagtttattgaattcaaatgactactcaaactctattccacctagatggaaaacttttttagacaatatctgaccactaacgcggtgggcccagaaatctgcatcttaatcagatgcttcaggtgagtccgtccgaggattgtcctagtaccacactttgagagactgcagtgggggtacagagtgctggaggggtttagtcaatagctctagtgaaggatggatagttttattcaaagaatcccagttgatgaatgaagaagaaatgctagaattagaaaaattgcaaacccctattaaaactaccgctcaggcaatgctcaacaatggatgtaaaacaattaggtgaaatgttgatggagaaattcattacaaaggaatagccctctgaacccactgatcaatgttagcatcattacgaatgaaacaaccagacaccatatgcttcctgctgtgctgcaatattaattatatggtaccacctatgaagtgttcttgccctctcccccccaaaaaattgaacctgaatttaatcaaagctttagatctaatatttagtgcataggaaataagtagagtagaaaaacaataccagggagaagcaattagccacattcaaaaaatggttcatttcaatagaacaactgacctggtttctttttcaatgtgttaatagtgttaaaaagtctgttttagatcaaaagagactgatgagaccacatgcaaatacattgcacagctcttgtttgattcaaagaagtcaagtgtaaaagacattttttagacacgtgaaatggtgttgcggctgactaaaaggatgtgtatgtgtgtttttgaagtatttagggctaaaatatgtccaggattggcttttaaatactacaaaaaatggagtatgccaaaacgttgaccattgttaaagctcagtgaagggcaggtagatgccaattgcactcttcacttttatgtgcaaagtttggaaaatttcacaataaaatttttgtgtttacataaatgaaataacatgggaaaatgttctaaggtatggcaagtgaaaaaagcctggaaaataactagtttgtcccacttaagtttttaaaggtgttaaaagtacatgtttcaaaaagtaaggatagactaaaaaagtgaacggtggtaagttctaagttgtgggcttacaggtgttctttatttttatgctttgctgtattttccaagtttttttttttaagttttccaagatgttttacatctctgttcttatttaccagataaactttgtggttagttactggataaactgtaaatagtgataaaatttttaagtttatatcaagatagcacttcattttaaaaccagtaattattaggttggtgcaaaattaattgcagttgttgccattggaagtgatggtaaaaaccgcaattacttttgcaccaaccttatatttctaaaagatcaagttgtaaacctatttgttttccctaagatccgctcttgcagagttggaataaatatgattgtttacacttaagagtccaggactacagcaggcctggttggaggggagttactaatgttcccagacttaaatccagctggaacaccacctaaaatatgcagtaacataagaccatcaaaagcaatgtcccaggacttacaatgtttgctaagacgcaagagggtgtgacacagacgctaagcgccactggcgaggagatgaaggggtcgtcttcatcttcgccggatgatttccgcccacatagagggcgccagtgacgcccacacacgtgctggtgtcccgggaagagttcctggcaaagagctcaggaacgttggatcttaatcaaggctttctccgtcggggtggatgggttggactttaggctccagcaagccccgccccactcggcgggtcggtgccgccgggtcccaggtgcccgctacttcccagaacctccgcctcccgctccgggccctcgaaccagcgcggacaccacaatggaccgggcgtccgagctgctcttctacgtgaacggccgcaaggtgagcgcccgcgggcttcctctgcccccagacctgcggccagggccggggcagagaggagcccctgccgttcgtcccatcctttcgtgcccgccgtttaaggcactcaggcacggactggctttctcccgtaacagcggctttgccttcgcattcccacccctgcctccggggcagctaaaggctgcgttttcagggactgtcctggatctttgggcccccaccttccttatgttcccctttcctctccttccaaggctcacaagctgatttccaaccacacgccctccctaaacagtaagataaaaagtattcttgcccatcaggggtcagcactcccagatcttcgttccctcaatcccagccgataacgggaacgtccccagtacactgagagcagcctacagaaatggctgagcctcagctcgcggggtgcgtttggaagcgcagagagcaacttagattcgggacaagaccgtagagacgaacacattcaaaccacccccatcgtttctcagatgaagaaatcgttactttccaaagtcacagctagttcctggcagagctgaacccaagtcaggctctgggggctccaaggtcctcacgggttccactgctgggtgcgggctctgtcgcctcagaagctgggctcgctctgcgcaacccgagggacagttccaggcagtgtccgatgtttgggagaagcaaagccccctgggcatcctttaaaacaccccccttaatgtgagcatcaactctgctcactcttaatgttccagtttcattgacattactctgaaggaggaaactgaggcaggaaggttaaggagctcccttgagagctgtggctcacgcctgtaatctgcactttgggagaccgaggcaggaggattgcttgagcccaggagttcgagtttagcctgggcaacatggcgaaaccttgtctctacaaaaaaaaaaccaaacaaaacaaaacaacaacaacaaaaaaaaaccggtgtggtggtgcgtgcctgcagcccagctactggggagggtgaaggaggattgcttgagtctaggagttcaaggttacagtgagctgtgatcacaccactgcactccagcttggacaaaagagtgagatcctatttcttaaaaacaacaaaaacagagctaacaaccaagcaagagcagtggcacctgatttccctggtgctcgtgttggtgccggttcattcagagccacctgtgaccactgcttctggctaagggcagccacaacacttttcccgacgggcaccagctgcctcccctggaagctaaccagtgtgaagcaccaggccctagttgtgaggcctgttctaagaccctgagcctaatttcatttgtggttttgtattatgtttcttaaagaggatcccccaaattgtacattaggcccctcaaaaactttgtctgcccctgctgcctgggttctacattggataagatgagctagtttttcctgatctgtaagggtcattaggaccccttcacaggactgctgtgagggtgaaatatgacaatggggtgagatgattgacattatgtcatttttttcttcttttgcataatagaatggtatagtaaacacaacactggctttgttgtttagacaaacaagtcttcaattccaattctaattctgattgagaaaacctaacctctcagaggcccagtttctctgttaaaaggggatcataccacttacttcataaagagtgatcatgagcattcaatccacttatttgttaagggcctaccgtatgccagtcagtgttccaggcttatgagatacagcagagcacagaaataacaagtccttgcgtgcatggagcttacattgtgctggggagatagcaagcatataaatacgtggaaatgtgtaatgtcaggaagtgagaagtgctaatataaaaaataaagcacagcgtggggacagagagtatgcaggatacttagaggggatggatgttttggcctgtctgaaagggtggcatttgagcagtgactgggatgcagtgaggagcaagccatgcaaacatctggggagacagcatccaggcagtgggaatggcaggtgcaaaggtcctgaggtaggaggatttctgtgtgcttaaggaggtaggttggtgggcctggcaacatgggcagtggcctgattactagggctttataggtgatggtaagggtttgggttaaatgaagaaacagggattgtgagtctaacatctcctcgcttctccttcccccacttccaaacaaatattggtatttttaacataatggccaacaagtttgtgctctattgatttttaaaattagataagctagttcttatctacggactcactttgtctatgggccaaatgtcctgtggttatttgtaaagtataatctggagatattgattctgtttttgcaattacccattagaagaaattgtgttaatctttccctttccttctcctcccttctaaattctgttaggtgtgtgcttcggtacttaataaacaagcctgattacttacatggaaagaactagaataagctttttttttttttttttttttgagatcgagtctcactctgttgcctcctgagtagctgggactatgaaactgcaagcacccaccaccacgctaatttttgtatttttagtagagatggggtttcactatgttggccaagctggtctcaaactcctgaccccaggtgatctccctgactcggcctcccaaagtgctgggattacaggcttgagccactgtgcccagcctagcataaactttttcgttccagagagtaagggattgttgagaagagtgtgagagaaaatccaccctagaagagggcttttgaagtcaaacacaatctctggaattaaaaactcacctttgaaaaagaagcttagaagtgaagccacttaggagaaaataggtgacatgattggcttctattctgctttttgctaaattttctcaggtcaccaaaagttgtcctcaggcagaaggtaacgacatctggaggcaaggacagcgcacgttggccagggacctagttgcagagagatttctgaaatcttattcactctaccaaggcccccagaagaacagatgacccatttaacatggagtttaagggaggaagagcccatgaataaattctgccatagatgccacataacaacctcaactcaggaaatgaagcatgtcatttcatgaggcaatgaggtgtggaaatcaaaggtatgggccttagaactagtcagggatgggtttgaatcctgtgctatctgctctgccacttggcgggtctggggcctcgggcaaggtacttaatgtcgctgagcttctgttttctcttttgcaaaatggagctaataacagaaccttttcccttgaaattggggctgattaagttgcatagagagaggttagcagggtgggtgtacacagtaaacagattgtaaattgatatgtggaaacaattgttgctatctggactataaaataatctgtttcattagcagagccagaacctgcttagaggtgtcaaggatgctaagaagcagtcatcctgcattatttgcacaatgagcatagacttttggtactggtgtaggaatctggaaagagcagtttattggctagcattctctaaggttcttggtttacaaggctgagagaggaaatttctgggcttctggaatggctgcaatgattcagagaaaagtggagaaggtggaggcaccttaggcagaaagaagtaacaagcaaaatgaattttaaaagcaacctaaagctcaggaagatgtgtccccatggctgttccctgaggcttctttctctcctctgaggctgctgtagattattgttctctactaactgcatctcacagcatacacccctttctttcctcctcttctacctctcagccttgtcccttcacatgcacctctaccccttccttattttctactctctctcctcttatctctctcttcctttctctttctgactctgtcttggatctggcagggcctcctcaggcactagtcactggcagtacacagagaaaagtgatttcttaaccaagtacagcatgaacttggactctcccaaaagggctggcagtgatacagaggggcagattccaccctcagattcaagactatgctgagatgagtacatgcaatgaccctgacctgagaactggcaacatctctcaaatccagagtcaaccagaataactgttacccatcccctgtatgccttctagcctccctctgagtcctaacctccctgtatcattcccagagctgccaggacaagatgcgtgctagatctctgcccccacttcctccaaatacaaccctcactacatcaaaacaacaacaacaacaacaacaacaaaacacatttcaaactggtgggactttgagccagattccaatcccttgaaacatttcctggaacacatacccaaacaagcatgaccaccttcttccatgaattctttcctcaaatatagaaatattcctcaagcctaaaatgctattctttactaactaggctacccagaccctgtctatccattaaaacggggcttctattgtttaccatcatatctaggaacagacattgtgaggttggggcagaagctttatggtgttatctgagacccacgtttcttctctcttttttctctcctgccattaacatgttgcctcatggtctaagataactgctggggttctagccatttcatccctattccaagtagcgggaaggaaggaaaggagaatgcatgccaggatagacaacctacagtttctgccaccaataacttctgtgtttttctttatttttcatctattcagatgcccaagtctatgagaaattccttccttcttggtatctcataccaaatcatacatagcatgttccagtcattcatttcattaattaacacttattacatcctgtgatatttccccaccaccaagctcagtgtttggcataaagaagaacagcagaagatggcttctttcaggatcgagatagtcttgtacacacacaaataattatgatacagtgtaaaaagtgtcataaaagaagaggtgaagacatcagccatgggaacaaagaggaggatggttactttgagatgcaaaagggtattttaggtggcagaactctccatagagaacacttgagcagggtggtgaatgacatacaaaattctgccaagaagagaggaaggattttcaggacagagggaaccttgcatgcaaatgcagtgaaggtgaaagtccaacgcaccccctggactgtccagttcatccgtgtggcctgagttcgaatttcttcttgtattccggaaatagttggttattaattcacctaagatccactcagtgtactcatttaaaaagcacattttctggttccctctaccagaaatcctgattccatagcggtttcattttaacaagcatctccatgattcaggaattcccagaatggcagtttggcagccaggagccatgttaaatttaggcatatacatgagacgatcaggcttgggttttacagcagtcactctggtcgtggtgcagaggacgatattgcgggtaccaagagtggaggcagggagaactctcaggcaggtcttataatcattcagacaataggtgatatgggctcatgggcagtgacagtagaagagaaaggagtttagaggaacattggaagcccaagtggaagaacttggtgacactgattgtggtggattggaaaaaaaaaagttgaaaatagctcaggttttttagcttaggtgacctagcagatactgaggccattaaaaggttaaggaaaagaagggaaggagtaagtaagtttggaaaataaaataaagagttccatttgagagccaattaagttgaagatacctgagaggcaccccatattttttcttatcacatacacacacacaaacagacacacatgcaccaatctttctatattgcggactcttctagggcacagatctgaccttggcaattggcatatgccacaccttgcctggaatatagcctgttagaattgagggtgaggcagcagccctagaataagcatatgtccactcctcacctactacttcccaggagggaaaattactataatatggtgaaagatgaattcagcttctgaaatggcaaagcaagtcatgcttctatgtgttctatgaatccaaaagaaatgtcaaatttttgtgaaaaaagagaaaacatgatcactttggaaaacataaccaatcttgacattttgatgtcatccttgagaaaaaacagcatgctgttctgctgctatgtgccaggctgctcccatgaacttgcctaagtatgtccttgctgcacagttttgcatcacttagcatacatgttttatcttcccctttgtttatttgattggggccatggctggttatcttttactggaaaccacaattatttgaacaagataaacaaacaagtctttttaaaaattaactatatcaatttctcagaggctattctattccagcaattcccctccctcctttcctttcttatttcatccactcctcccccaagtctgaatgttctactaatgtctttactctcacctgctttaaactttctagaaaaaactggacaggaggtagtgtttctgttagcagaaacaacaattgccttagagaacagcgataattcaggaccaaggacaggagcacaattgtggtggggctcaagattacacataagagtggtggtttgcatatcacagctgttccataaagctgaaatctacttgaaaatatgagtaaaagggctaattaacatgcatttccctcaaattagtgtgatcctaccaatgtgaatttcatattagctctctcaactaactcttattttccctttggtataggtgatagaaaaaaatgtcgatcctgaaacaatgctgttgccttatttgaggaagaagcgtatccttttctttactttgactgtgtatgtgtgtgtgtatttgtataactccaatatcctcattaaatgatatttcaaatatacattagagacactgagacatattccctactatcatggttttatgctcatatttgagaaagtcctatcattttataggcagtgcacaaatgtggccgtcagaagaaccaattttcttctagtctctgtataaaatggggaaactagtaatggaaacttaatagacgttaaaaggacctaactaagcatcctttagaattagagtcacaatatttatactctgtccttaaggactaattattatgcccattaggaaaagagagcacagaagtcacctgaaatgaaagtaaaaggaaaacggaagaactaaacctgaaaatgttatcctagaaaaacttgccaaataaatgccatcaaaggaatgtatttttagcttgctatgcatgaactccagtgggctacccgacggtgaaagacactactgaattatatgcaaaattatgtttcaaagagggtgtgtacatttttccccctggagagagtaaaattaccaaaagagtacataactccaaagcatcaataattatttttcagacacatgaatatgtttctgaaacatgctcatgaaagtcattcaagatctttagacataaaaaaacaatgaacatgactccctgattatccacagtacctatgtataatatttaaagtttggttcactatgagtgacagaaaactccacctcatggtaaacaagatagaaggtaggagtttctttctttctcattgtgttagttcaggttcttcaggatgtggacaccaaaaatgagattaaatgtgccaggattttattaggagaaatgcctgtgggaaaggaagtagggagtgaatcagaggagacttagggagccatttgatcaccgtgtaagtctgaccctggagataaggttgagtggaagggccctagactgctggtcagtctaaggcatgttcttcagaaccactggggatggttgacaaggactccatgtctctccatagcactaagccattggtggagagcagtccatgggaagcatggtcttaatgaaaactggagtgatcagtattaaagtacagcaacagggtcccttggtcagttaccctctgtgttgaagggaggtctgtgaggcatgtttgcatggctatcacactcacataaaggaagcccacaggtaggtggatcagagctggtaaagcagtgtcacaatgttgttgaggaaccaagcagcaccttcctcagcacacagctttctccccaccatcagagatgactaatggaggcccagccctcatatctgaattccagcaaataggaagaagtaatgagcaaagaaagaagcacccctctccttttaaggacactcttctcctggaagtcatacacaacacttataattacatcctagtagccagcattgttaatgaccccacctagctgcagaggagtctgggaaagtctattttttactctgggaagccatgtgtgtggctaaaaatcagtgtttctatttctaaggaattatgagagaacagatattagggaacagatggcagcttttgcgactgaaaggcagagaaatacacaaacatggctaagatgacacaaatattccaagcattatctacaatttaatattttgctttgtgtcatcaaagacagagataaggatgagaataaatgtgcaatgtgttcataccttcaaatactcaagtgcttacacatatagactcttcttttttcagttcagccctatttttggcaacctgacgtccagttgttttcaaagggagaatgcaagatataacacacaaaaggaaatcaagaatttacaagattattatagcttctataatagtaattaagacataaacacattatttgatgaatatgtattgaacttaactaacatttaagagtctgtgatattactgtctcctagtggcagggctattctagaaagagaattacataacacatatgatctttaactatacctcttccagttcgactcacaggaactaagtatggctgtggaggaggaggctgtggtgcttgtacagtgatgatatcacgatacaaccccatcaccaagaggataaggtaccgtgcagcaaagtccagatatggttgaatttttataattttgaactttgttatattccttcatttggtaaatatatattgagtacctaccatgtgaaaagaactggccacttggcgtacaatgatgaacaagacagacatggtcctaggaatatgaatgttttgggaaaaaaatgtagcatcaatgaggataacatacggtcaaagaattccccatcaaagccaggtacagtggcacacatttctagctacttgggaggctgtcaggaggattgcttgagtttgagtccagcctgggcaacacagcaagaccttgtctctaagaaaaaaaaaaatcccctgtcaaaacttgaatggctccctaactccctgtctggggaggaaaggcaaggctgaaattgcagtggaggataatgccatcatcacattcatatattactcttccagcccctaacttatctccttcctcccatctggtgcattctccatacatcagccagagtgacctgctttaattatcatcagatcaagtcattcccgtacttataagcccccaatggcttcccattatgtttaacatctgtttatgtttggtatttatccttcctcacatttgccaagtttcttggatctgtgtgttgatgtcttctggaaacttctcaaggcattatctcttcaaatatttactctgtgccacacactcttccctctgttcttctgggaatccaattatgctaatgttagacgattttacatcatttcacagatcgcacttgaaggctaaggatctgagcactggtgaggtttcagatatctgcctgtgttccacaccaaactacctgctgtctgaactctgagaggttcctccctgctttacggcctggctgtcagctttttagttcatgagggatttctctttgcttacctctctcaccttccatgctttgggagatctgtcgcagccatgttgctctgtctttagcctctagggagtggcgactaccctatgctctgtgaagtctgagtacctagggtttctctcagttctcctgtctctcccccagccttctttgtttaaggaccagtatgcttggaaagtttcttttagctctccttccctgcctattttggggaactacccccggcactcagtgatctctggtggggaagagattgaagataatgcatcccagctttgtatttgaatctgttgttatcagcccacatgcaaccattcaaaatttgttggaagttggtctggtttctccttattcctgtttaaggcaggttccttttcctccttcaatttcaggaagagaataattgtatctcagggatgagagcaactgtatcttctctcttatgaaggggttgtcacatcggagtttagtttatttatttattaagttttgctcataaagtttctttgtgtactcagcatctgatgagctttgaaaatgtgattatgttcctcgtatggtttactttggtttttagaatgggagtggcagtctcttacaactcttaatggcttgtttttaccttctggtctttgtactaaggcaccagtttctccagttctttaatgtttaacttatgcatccatcagcgtgacagtgaggtgttggtgaagtctggctgctctggttgctaatggagacctggcctgccataggtgcatggttacctgtgactagagaatgtcaacccctcattcaagagcaaaaaccatcaaagttgtgacagtttttgataagtggacaccattctggaattagaattaggaggcgtaattttaatcctgcctctgacactctggctgtgaccctgagtaaatcactctgatcctcagattccacttctctaaaatgggcctgtgcctgagctaaggaggaaatgtatgtgtaaaacctgggtacattatacaaaaacctgccacagtggagaagctcagtgaatgcctggcccctttcccactgtatgcgacataatttgtaatttgtgcttttcttttgcattctgaaggcatcacccagccaatgcctgtctgattcccatctgttctctgtatggtgctgccgtcaccacagtagaaggcataggaagcacccacaccagaattcatcctgttcaggtgaggatgtgcctcttccttataggctttctgtgctttagaaacctcatgacattgagtccctgagattaagagagcggagcagcctggggcctgctggctcggccactccaacagatacaacctagctgggaacaagagtgaagcctggcatattgggatatgtgagtgtttctgactaacttgttggaaaaatgcttttggaaggctagaaaaccttttcttctctaagaatgccctgacatttgtgggtttgttttttgtgttctaattcgatgggacctatctatttgacatcttccaaactcataaagaaacaagagccaggtgcagtggctaacacctgtaatcccaacactttgggaggccaaggcaggtggattgcttgagcccaggagtttgagaccagcttaggcaacatggtgaaacatgtctctacaaaagtacaaaaattagtggggtgtggtggtgagcacctatagtcctggctactcgggggtgctgaggtgagagaatcacttgagcctgggaggttgaggctgcagtaaaccatgattgcaccctgtacttcagcctgggtgactgagtgagaccctgttgtaagaaagagaaggagaaaaagagggagagaggagggaggaagggagggaaggaaggaaggaaagaaaagatgaaggaagaaagagaaagaagagccatgtgcattgagggatataattttatttttttttataaagtggaaaacaacatgatcttaaggctgagtgaaaatttcagctaccaaaaagctttgttatatttagagcttgtttggaagacagatgataggagttgtcaataagttttttggcttttctcctaaagaagcaccttgttagagttttagactcaagtaaaaaggcatcttcagacacctgagtctttatgtatatattgcccataagaatgccatttctaggccaggcgtggtagctcatacctataatcccagcactttgggaggcagaggtgggcagatcacgagctcaagagatcaagaccatcctggccaatgtagtgaaaccctgtctctactaaaactacaaaaattagctgggcatggtggtgcatacctgtagtcccaagctactcgggaggctgaagcaggaataatcacttgaacctgggaggtggaggttgcagtgagccaagatcatgccactgcactccagcctggcaacagagcaagactctgtctcaaaaaaaaaaaaagccacttttcctcatttttattgaagttaatgaagatcaaatatgagaaaagatagaaggaaaagataggagcaacatagaaaatgacccaagttcaaattttctagatttgaaggaatcttggattctgtttatttgaaagatcattacccagagggagagaattttgcctggatcattatgacatatcattaactagagggagagaattctgcctggatgcccatgtgagacctggtcatacacaggcatacaataccctttcatttcttcattgatgcggaactcccattgttacaatgttgccagaagacagcttccaaaatcgacttgaaccttagaagttagactccaaagcaaaaatgctagggggagggaaacgtataaaagaaataaaagcattttattttttatttattttttttccacttctcaacttgagtgtaatttggtttatttctctgaaggatttcttttatctcagtaattcacaaccacaactgcacgttgaaaccaaccatgtgggaatctttaaaagatgtatgcccgtgccccattcccagagactctgtcagttggtttgtggtgctgtgtggggcttgaaatcttaacactgtccgggtgattctcaagagtggtaaccactgccttaagtgaagctcaaaagcagataaggcccaacctcacaacaacccagccctggggagggaggtgcctgggatgagaagggctcccaggggcctctgctgcaatcttaacatgcagacaaatcacctggggatcttgctagaatgcaggctctaattcattaggcctgggatggggccccaaattctgcatttctaacctttctgtgcttccaggagaggattgccaagtgtcatggcacccagtgtggcttctgcacacctgggatggtgatgtccatctacacgctgctcaggaaccacccagagcccactctggatcagttaactgatgcccttggtggtaggttatatatgcatgcttttattttttaatttttatttatttatttattttttgagacggaatctcactctgttgcccgggctggagggcggcggcgcaatcttggccccactgtaacctccgcctcccaggttcaagcaattcttgtgcctcagcctcccctcatgcttttacttttaaacgatgatgatgataatgataacagctaatattggatacctttcatgtgccacacacatttaatagtattaaatactatttgaagattatctcatttgatcctcacaaaaaatttataagataggtactattgttatccccatttcataaatggagaaactgaggtttggggagagtgatttgttcaaagttacacccccaataagtggaagaattggtttgttcaaatcaggattcaaaccaacccacacattgcatttggctgatgtatttctgaagtctcttttgtttttataatcattaaaaagccagttattcatcagcccttgggaagagtcctgttatctccacatgctgctccctcaccactctccctactgggtggtgggtgctttcaggaccatattcaacatcagagggctgcgatggttacagcataaagtcagagactgagatcttatggtgaaacttgatacttattgcaaagaactgtctatccaccctagagcgtttttgtcaagttcaggagctcagtgtgtatgtggcggggggggacatcctcatcaacaagattctaaacacgtttttttaagtgataccctctcaagttctgtttctggtgaacttctccatggctccgtttgtctttgtctcaggcctcccgaagacctcatttctctgctagagaacatgagcctaaagctcatatgtacacttactctgcaaaaatgttccaaggaaaaccagaacaaatggatgtagaaaggagagacatcgctcataaactgtcttctgcctgatttccttcagatcttatcatgaatttgatttcatggctgtttatgatgtaaacaagtgataaggggttctcagatttcagggtacttaggtcatacatgggaatttgtgggtaatgaagattcctgggacccacccctagagagtttgactcagtaatattgttttttaaataagacttcagatttaggggtggaggaggaacaccggatcgcactgtgggagaaacgctggcctgatgatttattataaataaataatgtgccctactgctttcacagtttaataactacctttgctgctgtataataactttgatctttctgtcagctgaagcttagagtgcttttttttttttttttttgtcacagtaagtgttaagaatgaggggttttttccttagaaaaagaagtatagcttgctatttgcaacaacgtaaatgaacctggaggacattatgctgagtaaaataagccaggcacagaagaacaaatactacatgagcccacttatatgaggaatctaaagtagtcaaactcacagaagtagagaatagaatggtgattaccagggcctggggaacgggaaaacaaagatgtattcgtcaaaggtaaaaagtttcagttatgcaaaaggagtaagtcctagagatactgtatagcataatgcttatagttaacactgtattgtatactcaaacatttgctgaaagggcagatgttatagtaatcacaaaataaatgaataaataaataaatgatgggagggaagttagaggtaatagatatgtttataacattgaccgtggtgatggtttcatgggtgtaagacttatctccaaattcaccaagttgtacagctttttgcatgtcaataacagctcagtaaaatggattttactttttaaaaaaaaaattagtttggctgaacacagtggctcacgcctgtaatcccaacatttagggaggcctaggtgggtggatcacctgaggtcaggaattttgagaccagactggccaacatggtgaaatcccatctgtactaaaaatacaaaaattagcctgacctggtggtgcacacctgtagtcccagctactcggggggctgaggcaggagaattgcttgaacccggaaggtggaagttgcaatgagctgagactgcaccaccgcacctgcagcctgggcgacagaatgaaaccctgtctcaaaaataaaagtaaaaataagttgtttttaaaataaggcttagctcttgaatgtgactgtagagcaagtttttggtttgaaattattgtgttgtttgagcacctgtcacaagcagaaggcataactttacaggagaaagtacaaatacctgagcttttaaaatctgcctcaagattcttaatgaaatatcccaagttgctgttgaaaagatctgactttgtagattaggtggactaaaatgtcaaacagatctttcctctatgatagggtcctcatttccatcacactcttggtagactgtgcctctatctgggtcacttggctaacagagctgggtttttctccttcaggtaacctgtgccgttgcactggatacaggcccataattgatgcatgcaagactttctgtaaagtaagtggaaaggaccacatgtttgagtatgttttccccagtgaaacgaaatggtaatggttgtcagtgattaggggggcagccatcttactaatacatggctacttcttatctccaggtttctagctgctgtttgttatttgatcttgagcagggcacttaacctcattcattgagcttgccttggtggtcgcataatgaacacctgagcattttgacactggctgtgtgtcattgcttccaagaggtctttcctgacctctttgcctgggtcaggtaccctggcctggtgttcctatagccctctgcgaacatgtgacgggcatacacatgtcccgtcacagctttggtcacaatgtggtgcaactgatcatttgctatcccatgtcttcaccagactgtgggctgcttcacagtagaggctgtatatctccgggtccagtcaccatatagtcattgagtagctactcaatatttgttgaatgaataaatgaacaaacaaagttgaaatgaaggatataagattgccctctggaagttaaacaatgaattcagtatatcatagataagaacagtgatgacaataacaatacctgttaatatttattattaatatttaaaatactaacaatattaacagttaatcattattaatatttactatttaatgctatgtgccacgcttagttataagatctttatgtcttttaacttatttagtaatcactgctattcaaaattttctgtaagctcaggtttttcattaatgttggtttggatatgtttaagtacaaatggctctctttcatggcatctaacgatattgattcagcattatgtttcaactggcattcacctgctttatttactagttagtagaatcagcaataaattcctagtgatttgttttttgtccactagacttcgggctgctgtcaaagtaaagaaaatggggtttgctgtttggatcaaggaatcaatggattgccagaatttgaggaaggaagtaaggtcagtgaaatgtaaagcttttataaggctttctcaggacatgaacaggagccaacatactcttaggaagaacaaatggctacccaagttgactaacttgaggtatgtcaacatgtgccctctcccattctcactccatctctctataaaaaaaaattatatcgcagcaactttgtcctcattccagatattattcccatttaaatacagttatctacaggagggaaaacacattggttccttagtgtctcttagcttttaaaagcattttttcaagttatttttcaagggccagaagtaaagtggagatgtcatgaaaataaaagaacaggtagaacaagtagagacaggagaggttcagggagccgttcttgttccagctgtgtctgcggctgctgcctcctcttctactgtccccagactccaaagagaaggtacagggagttgaggcctccagaggcccattggcatcagcactgagttgctgatgacaaggtttgtgttagagcccttggtttggagcgcggggattgtggctggccagtggacttttttgtcggtttgctgtatctgactgtgtatctatatcttttgaccttattccacaaaggattttaaagttgctcgataacagtaatttctgatatgttctctttttagacaagtccaaaactcttcgcagaagaggagtttctgccattggatccaacccaggaactgatatttcctcctgagctaatggtgagtaaagcaatgttgagctcatcctagaagaattcatggtgaaatatcaggaagggtatttgtttatgggttctctcaaaagctgattggcaaataggtgaggcctctctgtcatccttagctcaaggtctaaagagtatggactaaggaagaggaggaggaatgggggtggggtccccatgggggacagctgagttgactgtaagaagcagcagatagcttctataaaatcgtgaaatcacagtgtttgtaggtatagacatgtttcctactttcacttttgctgaagtttattcctccatagaatgatttaacaagattcagcatgttactatatttgctaacattaaaatgatgttctttgagacaagagcaccaaagggagacagaccaagcagttcccaggagtaaagaaccatcgtgcttttattctgaattctaattccttgtaaagctctacttttaggtcactttgtactttattttttagaagatatgtattttctcattctgtatctacagtgctaatgattgagtggaaacaggtggagatggcatcattgggtaccttgaatccctattgctttttcaatagataatggctgagaaacagtcgcaaaggaccagggtgtttggcagtgagagaatgatgtggttttcccccgtgaccctgaaggaactgctggaatttaaattcaagtatccccaggctcctgttatcatgggaaacacctctgtgggtatgtagaaccccagggattttttatagggaaattgagaaaaagggcttgggatggggccggggtgggctggggaaacttcatatacatgtgttctcaggaaaagcagtctgaaatagcatttttaatcatttgagctagacttcctgagcattgctcaagagactttctaactgttattaagtagattcctcttgcctcttattggagcagtgtcaagagttgtaccgaaggggcttgctccatagcaaaccagcagcaggagcttcagtgacagctgtcctgtctttccttttggggactaatctgggcctcaaatttcaaattgctctttgtttcctctctcagggtgtctcaataggtatatgttttacttaaacaaccgctacagggtcttcctgttgcatccagtgtgtgctcagcttgaggagcagcccctagagtcttcccagagagaattttgaacatgccatatggcccaagtttcaaggttgacaattccagagtcttccaagtttgatgaaaatctatccagccattctctctgtatgtgatttggcaataaacagatgaatagaaagatacaatatttttagatatttaaagatattagtttaataataatttcaaatttaaaaggcagttagttcctttattctagtcttattgatttttttttttttttgatcctttagggcctgaagtgaaatttaaaggcgtctttcacccagttataatttctcctgatagaattgaagaactgagtgttgtaaaccatgcatataatggtgagttctcaagtccctgttttcttagttaagatgcattaatcaatttatttaccttgcccagcagacaagcagaaaaagaatgattcctaattataatacacacagagattctcttcttataagaatgatatgtttgttggccacataaatgtcttcttttgaggagtgtctgttcatatcctttgcccattttttgatggggttgctttttccttataaatttatttaagttccttgcagattctggatattagacctttgtcagtgggtagattgcaaaacttttctcgcattctgtaggttgcctgttcactctgacactaatttcttttgctaggcataaactctttagtttaattagatcccatttgtcaattttggcttttgctgcaattgcttttagtgttttagtcatgaagtctttgcccatgcctatgtcctgaatggtattgcctaggttttcttttagggtatttatggttttgggttttacatttaagtcttcaatccatcttgagttaatttttgtataaggtgtaaggaaggggtccaatttcgttttctgcatatggctagccagttttcccagcaccatttattaaatagggaattctttccccattgcttgtttttgtcaagtttgtcaaagatcagatggttgtggatgtgtggttttatttctaaggtctctgttctgttccactggtctatatatctgttttggtgccagtaccatgctgttttggttactgtagtcttgtagtatagtttgaagtcagatagtgtgacgcctccagctttgttctttttgcttaggattgtcttggctatacaggctctttttggttccttatgaaatttaaagtagtttttctaattctgtgaagaaagtcaatggtagcttgatggggatagcattgaatctgtaaattactttgggcagtatggccattttcatggtattgattcttcctatccatgagcatggaatgtttctccatttgtttgtgtcctctcttatttccttaagcagtggttggtagttcttcctgaagaggtccttaacatcccttgtaaattgtattcctaggtattttcttctctttgtagcaattgtgaatgggagttcattcatgatttggctctctgcttgtctattgttggtgtattggaatgcttgtgatttttgcacattgattttgtatcctgagactttgctgaatttgcatatcagcttaaggagtttttgggctgagacgatggggttttctaagtacacaatcatgtcatctgcaaacagaggcaatttgactccctgtcttcctatttgaatacctgtatttctttctcttgcctgattgcactgggcataacttccaatactacgttgaatagtagtggtgagagagggcatccttatcttgtgccagttttcaaagggaatccttccagcttttgcccattcagtatgatattggctataggtttgtcacaaatagctcttattattttgagatatgatccatcaatacctagtttattgaaagtttttaacatgaggagatgttgaattttatcaaaggccttttctgcatctatagagataatcatgtggttttcgtcactggttctgtttatgtgagggattacatttattgatttgcatatattgaaccagccttgcatccctgggatgaagccaacttgatcgtggtggataagcttttcgatgtgctgctcatcatcactgatcattagggaaatgcaaatcaaaaccacactgagataccatctcatgccagtcagaatggtgattattaaaaagtcaggaaacaataaatgctggcaaggctgtggagaaatagtaatgcttttacactgttggtaggggtgtaaattaattcaaccgttgtggaagacagtgtggtgattcctcagggatctagaaccagaaataccatttgacccagtaatcccattactgagtatatacccaaaggattataaatcattccactataaagacacatgcacacttaggtatattgcagcactatttacaatagcaaagacttggaaccaacccaaatgcacatcaatgatagactggataaagaaactgtgacagatacacaccatggaatactatgcagccataaaaaagaatgagatcatgtcctttgcagggacatggatgaagctggaagccatcattctcagcaaactaacacaggaacagaaaaccaaacaccacatgctcttactcataagtgggagttgaacaatgagaacacatggacacaggaaggggaacaacacataccggggcctgttggcgggtggggagcaagggaagggagagcattaggacaaatacctaatgcatgcaaggcttaaaacctagatgacaggttgataggtgcagcaaaccaccatagcacatgtatacctatgtaacaaacctgcacattctgtacatgtatcctagaacttaaagtaaaataaaagaaaaagaaaatggggacagaaagcataaaaaaaaagaatgataacattctggaggaagactgagggaagaattctctaaagttaatctaaatactaattgtctgaatagttcagtttttactgaagaacttcttctgtctgcaatatcagagaaatgtaacaactattcaatgaaggatacggtgctaagtgctggacagaagataaagatgaatataacacagtctttgctctttaaaaccacagtagcgagtttatgtattcaacagcttacagactggtttttctactcctgtagaggaaattgatataatggcaatgataagaagcaatagaaatgtgggtttgcagtacagcctctgaaatctaactcttgacaatggcatatattagctgtcagatcttaggcaagttactcaactctcagtttcttcatctgtgaaatggggctattaatatctcataggtatgttcagatttaaggagattatctaaagcattcaacataatactcaatagagtgagtgttcaaagaattcagccttcattacctccatcaacaccacttacatcactaccaccacctctatcattaccccaccttcatcaccaccaccacaccaccccctcaactgctatccctaccaccatcgcctcaccaccactttcattactaccattaccttcatcaccatcaccaccatcactgcccatcaccaccatcaccaataagcagggcagcatgtatccagtataaagattctatgtctgtagctttggtctaatggacattttcagatcagcagtgatcgcactgtgttatttacaaatgacttcatttcaggactcacccttggtgctggtctcagcctagcccaggtgaaggacattttggctgatgtagtccagaagcttccagaggagaagacacagatgtaccatgctctcctgaagcatttgggaactctggctgggtcccagatcaggaacatggctgtatgtatctgatgacagtaaactctggtatgcatcccttgggtgactctccctgatgaatcatgacattttcattcttttggaacagacaaaaaaaatagttctccaaagccttgcttaatccttattttagcacttgcttttttatgattacataaatgaaaataactcattatttttaaaagtctttagggggacacatcattagcaggcatccagattcagatctgaatcccatcctggctgtgggtaactgtaccctcaacttgctatcaaaaggtaagtgacagcccctacttggagattattaagctgtttctctacccctttttctctctggggaggcaggaaatccagtcttgaaaatgacttttccctataatatcaatacatttctctgcttttctggatactggaaattttgtgagtcttgtcttaatagcacaggctttcttcccctgtgtctttctggttttttgtttgtttgtttgtttttcctcatactggtcaccctacactggacatgtttgtgttggttaatgtccggatgtgatctgattattgctgggaactacatactattgagaactattgggtccctttgttgaagacattctccaggtggtacaggagtgttgtggcacccacatcgtgctttgagctcacacttaatttatcattgatggaaacatacaggtctttttcaggtgaaaaatgattgggcctcattctatatttatttacttgatttttgttattaaaactaagtccacaacatctaatttatcgcttcttccaacttgcttgaaaattattaggaagttctaattggtcctctgtaaatttgtggggttttttttcgttaaaaaatatggactagttttctatcatctgcattgttaaatacttactcttcataccatttaaaccataaaactatctttttttttttttgaaatggagtctcgctctgtcacccagtctggagtgcagtggcacaatctcagctcactgcaacctctacctcctgggttcaagcgattctcctgccttggcctcctgagtagctaggactgcaggcatgtgccaccatgcccagctaatttttgtatttttaatagagatgtggtttcactatgttggccaggctggtctcgaactcctgacctcgggtgatccacccgcctctgcctcccaaagtgttgggattacaggcatgagccacagtgcttggtcacaaaactatcttaaagaggaagatttgcattcagggttttcaatttgagtaacatcccctaaaagtcatactatgagaaacaggtttgtgatgtgaatatagacatcaaaagcttcttagctttcagtattttgttatagttttaaactgttcctcttccttatatattaattaaagaactaaaattcttcaggtgttggaacaagatataaaaaagtaagataacatctcagtagtatacaaatttattaaagataatttcttattcatgactgtatctagtggggttcctggttataaacaataaatatttgttggctgacttgatcagaatatcaaaagagatattaatatttactccctacttgtaaagttttaagtgaattgtgttgtcaggaagaggactgctaaggttctattctacctgaaactctgggctactctgtgagatcttttcatctattttttaaatctattttttatttttaaaaaaattttttagatggagtctcactttgtcatccaggctggagtgcagtggcatgatctcagctcactgcaacctctccctcccgggttcaagtgattttcctgcctcagcttcctgagtagctgggactacaggtgcgcacaaccatgcccagctaatttttttgtatttttagcagagagaggtttcaccatgttggccaggccggtctcaaactcctaacctcaaatgatccacctgccttggcctcccaaaacactaggattacaggtgtgaaccaccacgcccagtcgatgtttttatcgatgagaaagcaaggaaaacaaaaagagatggggcctagactagaagaaacattgcaagacgcattatagggtaaaagatttgcgaagcataggaagagcacctgtttccctgaacaaccggtttcctcaggtatttggtagaattacttcctaagttttggaagtttatttaacagaccaaacagatcccagggaaagtgtcatttctttccacagaaggaaaacgacagattcctttaaatgagcaattcctcagcaagtgccctaatgcagatcttaagcctcaagaaatcttggtctcagtgaacatcccctactcaaggaaggtgagaacatcccactgtcaatttcccagttgcacctgtgatgctatggcttgtttattccagtatatggtggaataagaaaaagggtgaagtgtttatgtgggagataaaggctcaacttcaggaagtggtatgaggtcattattttaagacttgtgaatagttgccttttccttgtattacgcatgcccctatcattcctcgaattaggagatttttttttttttttgagatcgagtctcgctcttttgcccacactggagtgcagtggcatgatctgggctcactgcaatctctgcctcccaggttcaagcgatcctcctgcctcagcctcccgagtagctgggattacaggtgcgcaccaccatgcccagctaatttttgcatttttagtagagacggggtttcgccaagttggccaagctggtctggaattcctgacctcaggtgattcacctgcctcggcctcccaaagtactgggattacaggtgtgagccaccactcccagacttatctctgccattctcgctctttctccccctaccccaagctctaaagtaactttctaaaaggtttttgtcccataagcctttctccctaaatatgacatgaagagtatgcctctacctatatcttgggttttgaaaaaagcctaaaaatacatttgcaatagaacttattggaaaaaacatgaggctttgcatgagatagagtcaggtttgaatcctggtttcaaggcctgaactaattactgaatccttctgcgccttggattcctcatctgtaaaatgggaataatcaagcctgcctcagaggatgtattagtttgctagggctaccataacaaagaaccacacactgggtggcctcaacaacggagaatgattttctggagatgctgggggctgcatatctgatatcaatgtgatactcaacatacacataccgtccagcacgtaggtgatgctcaacacacacacactacctggtgtgtaggtgacactcaacacacacagactgcccggtgtgtaggtgatactcaagacacacagactgcccagtgcataggtgatgctcagtgtttctacatgtgccacttaactgtttctttcagtgggaatttgtgtcagccttccgacaagcccagcgacaggagaatgcgctagcgatagtcaattcaggaatgagagtcttttttggagaaggggatggcattattagagagttatgcatctcatatggaggcgttggtccagccaccatctgtgccaagaattcctgccagaaactcattggaaggtaaggcattagaagtaagggctcctctaatacttgtccttagactccaagtattagaggagccctttttgtggtgagatgtgattacaagaagaaaagtgttccatacctttctatttaatggctgggaattccaataagattttgttattatttccatatgtcttgatgttagtgaattctgaagtgggaattatatactctgtgtgcgtgtgtgtgtgtgtgtgtgtgtgtgagagagagagagagagacagacagacagagaagccctccctcaacagtgcaaatttgtattctttattttgggagaataatttgccatgatgaaaaaccaattatgtgagtttgttctataataaattgttaaaggcatttgcttacctgacttcctatatctaaagatgacactaatagctaatatttcttgagcattacttggtatcagctgccataacaaagcatagtgattaaaagcatgagctttaaaacttgagaaaggcagactggccaaaatctcagtttaccctctgttaactcctccatgctctcagtcagcttacttaattatattggtactttggttccctagctgtcaaagatgggtgatcatacctacctcacagggcagttgagaggattaaatgagtgaatacatataaggtgctaaaagcagatcttggcatgcaataaatgtcctagtgaggacatttattagtgagtaaatgagggtcagttactcctggactgtggattttatatgagttgtcatttatttctctagatcattctgtgagttgggttctaatattccccttttacaggtgaggacatggcgagacccaggctagccaccttgagaatggtgggccaatttgaactcgggctgcctgatccagagcttgtactcttatttcctgtattaaactatggctatttgtcttacccattagatgaagatatggggtaataaaccctgtcaggctaggagtcttctctttggactttccaggcactggaacgaacagatgctggatatagcctgcaggcttattctgaatgaagtctcccttttgggctcggcgccaggtgggaaagtggagttcaagaggactctcatcatcagcttcctcttcaagttctacctggaagtgtcacagattttgaaaaagatggtaaacaactgtttacacattaacttccccagtactgggagctatgatgacaccaaaagtagaggcaatgactccctaccaaatagctgtagaataaaaaagacaatccacattagaaacacacgtacttgctgaacatccctcagcctgtctgtgggtgggtatgagtttagggaagaattgaaagtagagccaagagttgatcaggcttttatttaacaccactcaattatttggtttctgactgttagtttttccagatcatgttcagaaaacttgctaatgatttgggtatgttttccctctgtatgtcatttctttctcttgagctattaccttcacgttgaggttgacttcatgtgtttggtgttcttttccagattcagcttcatttccctagcccataaggtggccatgatggcagccactgcacaagatgactgtgaaatgcgtcattgtaggaaaagggcttcatatggtccctagtgcttcagaggaaatctgtagtagtagtcataataatagtagtgacaatccatgcattcttttgcctggtctctcttagggcaaacaattaaagctacaagattcttggctggggaggacacaactaaaaaaaattctctgaataaatccattagacccaaaggagacttgagcctcattggcctcacaaaccccatgctataaccagctgaccaaaacagactggaagccaagaacagtcttcctgtggtatagaagttagtatggtcactttaaatagcagacacaaagtcctctcttatccttgcttttgagggtatcttctcagtgtaggtgggagcaactaggaaccagaagggtagtatcacattattaagaatgaaaatttgaaatcatagataagtgacatattgtcaccaggtaaccaattatagactcctccaattagtagcaaactaatataatttctgggtgactcaagcgatgtaatttaaaacttttgccttgtagtcttatacccctcctctctttaaaaataatagcttttgttggttttatttaatttttttttttgagacagggtctctgtcacccatgctggaatacagtggtgtgatatcatagctcagtgcagcctcaacttcctggactcaagcaattctcccacctcagcctcccaaatagctgagaccacaggcatgcaccaccatgcccagctaatttctttatttttttggagagacagagtcttaccatgttgctcaagctggtcttgaactcctggactcaagcaatcctgctgccttggcttcccaaaatgctggaattacaggcatgagccatgacacctagctggttttattttctattaaaattatgtaaattagaaaaaataaccaccatgtgtattgttgaaagcctttccccccatccagctctaggctgtgcaatgttcagtcttgtgtaaagaaccaaatgactcacttccctcagtcctgaggaatgttcttgctggggaccagaatccttcccctgtagggcagcgacagggatgcagcctgtgtccccctttctacacagctggcaggcaacatggaacctttatgcttatttgcaatggtgtactttgactctgatgttttcctggcttaagtattttcttcctttctattttatttacttagcttctatcttcttgttggatcagtttgtaagtcctcatatcatttaggagagtatatgagagaatcataagaaacatagagctggtggaagccagttacctaccgtattcatctggctattcataatatgaggaaatatgtatgcacctttcagagtatatgtccttgagtcagggagctgcttgtatttctggggttctgaatagggtgagtgcttaatatacgtgagacttcagagtagagatgcttgctaagactcatgctagcctcacttccaaaatcattctggtgcattcaaactatttaaaatatctgcaatggttctacttttcaggatccagttcactatcctagccttgcagacaagtatgaaagtgctttagaagatcttcattccaaacatcactgcagtacattaaagtaccaggtgagcggtatttcttgtttttaaaaattcacaatctgggctatagtgatttgacctggacattcccactgtctctccgtgaaactcaagctctgtaagtccaagctccacttctggtaaactcacagcctctttatgggtaactaaaattccaaaatcaatgaagaatttgattaaagacaaatctagcagtggtaatattaaagaagaatgttgatttgggtcttaaaggttacgtgctttgcactgtggccttgtaccacagacacgcatgagatggccaccttgtcacgtgttttctgccctgggcactgcaggcatcagagtccaataaagccacgctctgcggcaaggccatgggctgctttgctttcattttcagaggaaaagacacagcccctagaggttgatgaaaattcaataatgcttttaaaaagaactgctgatttgtttagcttgaatgttaagatattttactcccttagtctctattcttctagtgatttttctgtgagttacattttagagttgaatcaaacgtaagtactaagagctttttgtgctctcgtaatgaaggctattagaaaacaggattcctaactctcaaatggaattttctgccacatcataaaaatatgcctgaagtcaccctgttggtaaagtggatacagtttggtgggtttttccttgaaattattatcaggaaacttgacctcgagagttttagtaagtcaagaacatgaaaaggctttttaaagcatttgttcactgaaactattgttggatttggttgtgaaagcttatagtatgtcgtaatgaacattgacgttggtgtgtattccttgaggttttaggttcaatatgtttaaaaattaaaatgcaccaaactccattgaaaatgattgttttgaaagttaaaaacagctgccatctccccggtgttcttttcaaatatgatagttgaaccctttggcttataaataccctaatatttcttagacaatggaataaacttcagaaagaaacaacaacaaattaatggatattgaaatcatccaaagaaaaaggaaaatcttcacatagtgcatgatcttgaatgagagtttatcattgattgcaaaacaaagttttagatgcaatatgtctgccacatagatgagttttgtttttgttttgcccgtggtttttcacacacacatacaaacatccacattgctagagcaacgtcagcactcacgaagagcatttttcccctaaatcagttcatttgctttgaaaatattttgacacagcttcaaaagatcaccagtttgaggagacagcattcttccttccatagtatctttagccaaatactaagcagaagcaggtaattgaggacagcttctttcaccagtagatttatcacaactaactgcaaaaaaaaaaaaaaaaaaaaaaaaatgtatgatatctttgacggtaggacaaagacattttttggaatttttcctcagttttttggcaggcctcacacaacatggtttcaaaagactttttttcaatgtgatgaagtgttttgtttgttacagtgaaatgtgttatgtcagttaactcccagacccattacagatacctatgaatgtctttccttaatgtctgagcttatgaattatctggaattttgcttttcaggatgaaaaaacttcttagggttttaaaaagaagatgtgggtgattttttttcactcaaatgtggttcaggttgagagcccaagcagcatcacagctcagcactttgggggatattttgcagaggaagtcaattcctaccatctgcaacatatgaaaaaccacacctggtagaacctcattgttggtttttccttttcatcactatctcagctcctcgaagcagagggggaagaggagaactgaggggattcctttgccatggggacagggcagtgtgagctacgtcaatagagctggagtgttgggactgtctccaatctgtgctcatgcctgaaccccaataagtaaacttttctctcattttccctagtcccctacattcgtggcctaatatctacctttattgaatggagccctgggccaaggtctaaattatttttctcgatagtctcctgctttctagctgataaagtcaggatgactcaacaataactgaaaatgaaaaaacaaaaacttagtcaatactccgttttttgttcactgtattatactaactacaaaactgaagtttacatttaagtaaaagaaatatgaaattagaacaataaatgcttatcaacagtgtttattttgcagcaaaacagtaaattttatataaaataggaataaatgcatcctacacacatgtcttataccaagttaattgtagaaattacactactttctgtgcatagttgtcagccacaatttggttgacattttacttcttgtcatttatgttatgaaaataatatggtttttttattttcaaatcaatgttgaacatgttctgaaataacacatgccactctgccgttctctcctgatattccagccctgccacctgcctggagaatctctgatctctatctccagccagaggttttttgtttttttgaggcccttaagtagttgggtagtgagtggggagcactcttctcgagttcctggagcagcagagggcactggagaactgtacatttcacagctgtcttaagtaaagctctcattataaccagaggtctcctccatttgtgggattagatgaattaaatccaaatgttcagaaaggaaagcaaaacatctgcatgaaaaggaaatgtgttaatcggggggatccagacagcttgtcttcagttccatagagcaagagccttggagcactttcactggaccagggcagactttgaaacaggaaaccctgcagtgaagagtgagatgaaataccattttagatggattcaagtatctaacttattgttcatatgtgctgaataggctttctcaaactgcacattctggtaatcaaatacaaaagaatttagcttttctccccgctcagatgccttaaaggatgctatgttggaaataggcctgtttcttcttttttctcccagtaaagatttttaaccagtatgtgttggcgacttgttctctcttccctcctgccatatgatgtgtagcctggcattgtaaggctcatctaaaaggaagatccagggctcagggtgatcctgtgagctgcaggatgggaaggggaggtgtccatagcttttctctgacctcaacctggccaacatgactgcatgcccctcacccccaggtcttccagagaaagcctctgggagtctggcctcagtcccagtaccgagtgcaatgttgacacagtgagttacagatgggggtacccaccagggcttagcaggccactcctcagccacagccttcaccctggccttatgtctgtctcttcacctgctctccttctttcttcatatcttcagttcttttcacaatacacacccgactgggaaagccataaattcccatatttgaaacaccagggcagacattgtgctgattaatgtctgctttgattaatgaaacacatttaaggtatttacagagccaacagcaagatattctgctccatggggctctaagaaagagcaacattagtggatcattactccaattgcaggtccctttggcttcattctctatcaggattgtctaagttaagagttttgccaattatttcttatatttcctcactcaaaattgaaaaaaagaaggctattctggttgaagtaataccctcagtattttctacaaacatagtcacgatatcatcatactcttctgtaaaatattatatgtatcgtgcttatatagaaacagtaaagtcattttgataataaaatttaaagagatacataagcattagcaagaggacataattttgtattgtcaagaagaaagatttaaatttgtttacttacacaaatggaatttccatttgagatgtttggggtctacattcaaaaaaagtgaaaaataagaacaacatcatggattgacataccagttggcttattgaattactgtagtaggtttattgtcttggtgttattaatagtgactttttttttttttttttttgatggcgtcttgctctgtctcccaggccggggtgcagtgctgtgatcttggctcgctgcaacctctgcctcccaggttccagcgattctgtagcctcagcctcccgagtagctgggattacaggcatgtgccaccgtacctggctattttgttttgttttgtttttttttagtagagacggggttttactatgttggccaggctggtctcgaactcctgacctcaagtgatctgcccaccttagcctcccaaagtgctgggattataggcatgagccactgtgcccagcccaatagtgctttttcatatgcaaaagtattctggtttgagtctaaattatatagctaccttcttatgggaaatgtgcataataataattcctactttctctatagaaatgtaaaagtatattttggttatttattaaacagaatataggcccaaagcagcatcctgaagacccaattggccaccccatcatgcatctgtctggtgtgaagcatgccacgggggaggccatctactgtgatgacatgcctctggtggaccaggaacttttcttgacttttgtgactagttcaagagctcatgctaagattgtgtaagtggtaaaattcttactcaatgggcataaatgattgtcttttcatctaagtcacactagtgaaaagtaatggtgtgaagaaataggctatttgttggtgatatccaatgcagaccagaggtgaaacaggatcgaaatgtaggatttactacaacttcgttgtcccaagaattttttcccaattgtctggcagagactgttggacagttcttacctctctcatatcttattatccaattaaccatgttcttggcctctatggccactctaaggagctctgctgtgtatatcatctaggtctattgatctgtcagaagctctcagcatgcccggtgtggtggacatcatgacagcagaacatcttagtgacgtcaactccttctgcttttttactgaagctgagaaatttctggcgacagataaggtactgcatttttgctttctatttgaaaaataactttctcagttaacggtgcttcatattttcttaaagataccatctactttggcacaccatgaaagactccagtattcttagaatgcttattataaaagtatattctaatattgaatgaattcaaatatattcattttctgtacaagtaaagacattaactagttatataaaagattatttggtgttttacattttctaatagtgagatggcatactgctaatggtataaatgagtaaatgaagatggaataatggtaaattttatatggaaatcccttccctgagaagcccttattattgtcccagtctcagtgtggtcaaagttcaactacaagttcaagtggtatctgcaccatgaagccttttttctcattcttcaatccagaagttcattcattctctctctctctctctctcaatttattctgatttatttatatttccatgtgttaaatgcgctttttattttttattttattttattttattttgaaatggagtttctgtttgtcacccaggctggagtgcagtggcatgatcttggctcactgcaacatccacctcctgggttcaagcgattctcctgcctcagcttcctgagtagctgggattacaggcacaaatcaccatgctcggctaatttttgtgtttttagtagacagcatttttgccatgttggccaggctggtctcgaactccttacctcaggtgatctgcccgcctgggcctcccaaagtgctgggattgcaggcatgagccaccacgcccggcttaaatgggatttttaaaagtgagcatctatgatgtctggtcaccatagctgaacaagatatgtatgatctctactctcatggagcttaaagtctagaggagaaaacaaagtgacctttatgtactttctaccttgtgttaagcttgtttattttgatgtcttatatatttcttccacctagtataaattccttgagtgaggacccatgtctgattcatctgtgtattccacacactgcttctcacattgcagggtgaatgagtagaggtatagtgataacattgttgccttgtgaaaattacaaatgattaaaactttggctacagcaagaacagcagtcaacaggttttctgcataattcggactgctcagttcagtgtttacccaaaagggcttcataatttgaaacagtcccttcctctggctctccttggaagatactcccttgaagatattatctgtagaaatgaaagcttgatgactgagagtttgaactcaaggttgaaactcccccaaagcagggctgtgtagcactggcagagacggtgagaatttaagccctttgcataaatgtttactaaacaagtgaaactgatcttggctgcatgatagtacctgctctttgaggtgtgcttatgaagatcataagcatctcaggggccacatctatgtgccaggtcacaggagcaaaatcaggagtctttggagtgccattgtgaatgattgcctttgttggtttaatgctttttaaaacattcatttatggcacttaatggcttttaaaagtcttttcattgtagaaattgtaagcatacacaaaaatgggaaagtattatacaatgaaccccatagatccatcacccagcttcaacagttatcaacacgttaccattcttgtttcatttttctctccttcactgcccctaccccaaacaaacacactttttttgtgttcatgctagattttatgtttttaatgcctttttttcgatgataaaactactttatgttcattgtggaaaagacataatagttcaaagtcaatttttaaaatgagtgattacattgaaattgtgaatcacagcataaagtaggagagagaactcagcaatgatggtgacttcttccagtccagactgtttttacctttctcaagtcttaaggtttcttttccccatctaaatttctgctgtggtccctgtgtgaactcctgagcctagctgccccacctgcaggcgaataatcctagctgtcaacccccccaggaaggggatgctgtctgcttggtcacgtcttggctaggacatcttttcatgaaaagacagtttgtgaggagagatgtgctcaccatcagggttctgttatcacaggggactccccttcccaggtcatcccctttttctctctggttgagatgatctgtgacttcctggtcctccctgtccgtgcaggcagaggctgcctctctcagaacagctctgattgtcgtgtgacagccaaacatcaagccatgggacaggctggccctcacacagcctcataggcttggcctggagcctgagcctgctgtcctcaagacagcatcactcctgctcctctgatacagcacaaggatctaaacttcccccagtgcctcggatcaggaggccagctgtggttatagtcatggacagatgtggaggggtcacacctgtgtgtatctagccctagccctactgtaatcgagtactaggagggaggaagaaaatgaataaaagagaggacctgatgcctgccctccttgacaacaaaggtctttctgtgtcgtaggtgttctgtgtgggtcagcttgtctgtgctgtgcttgccgattctgaggttcaggcaaagcgagctgctaagcgagtgaagattgtctatcaagacttggagccgctgatactaacaattgaggtaatgagttctgtggaatggtggtgccagttgggagccagaacaaatatcagttaaaatgcttttggctactgtaacaggaaaatgtggctcaaagtggcctccaaagcacacggactttattaacctctaaccagtctcagtattaacaatttccccaaggacatggcttctttttgccactcttctctgctgcccacaatacaagctcaattcctgtggtcacacagatggccgccaggacaacctggacttccttgttcatgttcaaggagtaagaggaaccctattgccccagcattctaagcacaaatcctgagatccagcctaattaagccacttaggtcacatatccatctccaaattaatgactggcagaggaatggaggagctgttggttacttctaggggtaggagttggggtcaggtttctctgaagtaagtgggctatgtaggggagtgtaggaaactgaaacaaatctgagccctgtttggaaagggaaaggggaggggatgctagatgggaaacagtgatgtccaggaaagtggatccactctatgactttttacccaccttcacccaggcacatggtgaggaccaacaggatgttccatgaagtgagtgtcagagacacgatttttagatttttcaagagataagtcgtatgatgcctacaggtattttggcaacttaaactggagaattgcattttctatcctgatttttagaaaggagttgaaaatttataaaggctataagactcatctccatgaaatgataggatgttctcttgtgtgcattccattggttcttataatttcctggatgatgaaagaatgaacactggggaggcagtgtaaatagatgagactcagtccatacaggccgcatgtgctctgggacacaatattagcttcacagcataatgaacatgttgttctctgggtgaccggcatggcctgaggcagaattgaggaaacaacctgggcacgatcagtgtctccaggagaactgggtgttgggggtgcttcttgccatgctgcttgatgcttaggaacatggagtttgtctctgggaatttttcttacattttaaaataaaaataaaatcatgtcaaatagacaaaaacgtagaagtctaattggagtcgaagtgtgattaggcctcccaaattttcctggccagtttcaaattcaaacactctgttcccttctcaggcccttttcatttacatgttgcatgctgctcttgcttcatatattctgtcccctgaagtttgctggagagttagaattacttattagaaattatttacgtaacacttcatcaatattttgtttataaatctttgcccaatatcaggggctaaatatctactctccactccccctaccttccagccaaataaaagccccaataagcaaatataatagatgccactccccccaccctcaccacttcaaccagcagactcgtgattgtctgccagagaatcccagcatcagatacaagctctggctttgtggaaaagagttgcctcacattgtgttcagagattaagctctcaaagtctaaagatcatcaactggatcagagcaaatttaatcaaagtttagagcagggaaatatgcccctctccctatacattacagttcttttatcactttcctgactaagaaaaattcagaaaattggctcaaagttattcaaagagcaagcagccagtgaagttgaaaaagatgaaacttttaaaaataggatttataaaacctagcttttttttcaacctggaatctctttaatcttagattaataagaaaagcacatgaacagattccaataggaagtgtgttatcaatcaaaatagaacaaaaacaaatatatctctgtcactatcacaaagatttaatctggcacatgcttttcgagtttttagtagattgaatggggcaacgatcaaaactcttgaatcaaggggtaaggctgatgaccataatggaaaaaaatgtgttccctaccggaatctgtcctgaataataatcatcaacaacaacatgagcatagctaggacctatacagagctcactgtgtggtcaacatggttctaggtcagtttcacacattaacttactaaatgctcaccacaatcctatgaggcaaaaactatttttatccccattctgatggggaaactaaaaggcagggttacccaaggttacatagctagtcagtaacaaaaacaatcaacaaacactctgtcaaagaacctgggccccaccggtgctataaacaaaccaacccagtttttgaatgggggaaatggcagaatcacaatagcccatccctctaaggggtgttgtctagacacctactggtggccagaaggaaacagagataagagaatccccaactaccaacagaatggaatttcatggatggacaataacccacagtagataatgccagcaggagctggcacaccacatttgccagtggacacatggattactgcaagataaattctcagggatagctaaaaaccaacctatgttattgtaactacatctctggttttgtgcaccactgtacccttttactgggcacccagggagagccaataggagctagtgtataaatggatttgtacacccagctcccagacagggcttgtctgaaatcttacttccagagctggaggtcccaggtgctctactgccctgtgcaaatgaaatgctcatccccacaaagaaggaatatggggctggcaggcagagccaccatgatcccaatcactagagtcttttcaactagcaattattgagtgtttactatatgcaatataagctcttcacgtcttatttcattttatcttcaccaaccacgatcctattggagctatatgcacacctgttacttccattttacagacaatgataagagaggtgaagtgataggcccacagtcaaagctggtaagtgggaaaaatgtgtgcacaatgctgactgggtctagagcccaggctctgaagccctgtgctgtatggccttggctacatgaaatggattgtggtgtgcagacaataacctgcctggaaaatactagtttcattctgggatcacttagatgccagtttttttctgtgcatattatttcttcagactcagtaggcacatttacatttcctcactggggagtctctctgcagttggattcttagcttggctcaccagggtcatggtgaaagtgcacggaaccacaaggtgaagggagaaacaacccctgctcagaggatgtgcagtggggtgtgtctgctgccctagggcagggtctcttgcccaagctgcctcattcctctgttctctttctaggaaagtatacaacacaactcctccttcaagccagaaaggaaactggaatatggaaatgttgacgaagcatttaaagtggttgatcaaattcttgaaggtaaaaagtaatggaagagtaaacaaccctggaagtcttctaagcatgtcagtttaaggcttcctttgtcttctggaaatcatcgggcagcctaggggggtgttgctcctcaggaacaggcagaacaggcacctcattcacaaatgtgtttccctccgtctctggggtaggccaagagccaatggggaggcaaaagaggaggcaagaccctgcccctcttccctgaccccccttccctcatcaaggctccagttgttagagatgtcattttctttcctgttcacaaccaccctgcaagagggtattattatctcaatcttataggctggaaaatggaggctcagcgtaattatggagtgtgaccaaggtcacacaacaactactaaataacagagttggccattgaattgataggctttattaggatttccaaagcccatgtttcttcttcatcctttctctctctgattctccctctcttcctttcttccttctctgctttttcttcccttcctcttcccttccctttctcctttctctttcttccagacttctttgctgtatgtatgtatgtaattaaaattaaatttgcctcttagaaaatagttaattatagctttccagtacaattccttaacttttggctttgagatattttaaaacttacataaaagttgcagaaacattaaagaaactcccaaatatttttcactcagattccccaattatacacacacacatacacacacacacacttctgagccatttgagagtaaattgtaaacatgatgtatgtctctttacccctaaatagtcagcatttgtttcctaaaaacaggatgttgtctaacataaacatagttatcaaaatcagaatattaacacatattctattaatctacacagtttattcaaatttcgctagttgtctcaataatgtcctttatagcagaaaaagaggttcatcataagtcttaaataacccatgctttccccgccacactctgctgtcattgctgctgtgaaagctgtcctaatgcctgcctcacaagatctctgatttacagacatgctattgggtgggtatgggcagtctgtgccacatctcagagcagagaaatcatccggcattatctgtctttaagtgaatttccagggcattggcctctagtgcatgttaaaaactcccatcttctgggctgggcatggtgactcatgcctataatcccagcactttgggaggccgaggtgagtggatcacttgaggccaggaattcaagaccagcctggccaaaatggcaaaaacccctctctactaaaaatacaaaaattccaggcgtggtggtgggagcctgtaatcccagctactgaggaggctgaggcacaagaatcgcttgaaccctggaggcagaggttgcagtgagccgagattgcaccactgcactccagcctgggtgacagaaggagactccatctcaaacaaacaaacaaacaaacaaacaaaaaacacaactcccatcttcttaatttttctcaccaaccttgatcacaagaataggaagagtcctaagacacatcccatcctgagtgcacagccagagctgtgtaatatgtcaccagtcagcccagcttcttaagttccaagcccatcatgtctcaactctataggtgcattaaacttgaagcgtgtcaggggctgactggaaatgtcacctgaaagctgtaggaaagacacctggaactgtcacctaccagttttccttggcattgtgtcttattagctgtgtaacctggcagggcacttctcagggctcagtctccctgttttaatattacatggataaagtaaaaacaatttcaaatgtgaattataaagattataagagataatcatgtgttcttggcatatagtaacaaatcaataactgtgagcaatgattattagatttagatgtttttgttgttttcctgaaaatgttgtctattagtgagatacgttggcaggtgttcatttatcaaacccagtgtttccaagattttctccttataggaatcactgaggatatttatgagacctagagatccctgtgcccttttttagaattgtagaggatccaaaacagcccaggaactggtcttaacaagttttccaggtaattcttagggctagtaaaatgtggaaaatactggaaaagtgagtttgatttatgggaatgaagagaaaaagagggtacatttctatcatagagcgttcccggcatgagcatgttggaaatatcaatatttaggggggttccttgtttcatgtttgtttcctgacataatgagtatttgtgcaagaattccattgttgtatttttccttgacatcttctttaattatctaattcaattaggtgattgatttagtctgcctcttacttgaatttttgttattgctgcataccccattgataagtataaaaatgatacgggaatattaaaaaggacatttatactacttttcagtataaacgccagctgcagtagctcacgtctataatcccagcactttgggaggccaaggcaggacatttgaggccaggagtttgacaccaacctggtcaacgtagcaagataccttctattaaaaaagaaaaaggaagccgggcatggtggctcatgcctgtaatcccagcactttgtgaggctgaagcaggcagattgcttgaggccaggagtttgagaccagcccggtcaatgtagcaagactccttctatttaaaaaaaaaaaaaaaaaaaaaaaaaaaggaagctgggcacggtggctcttgcctgtaatcccagaattttgtgaggctgaagcaggcagatagcttcaggccaggagtttgagtccagcctgggcaatatggcaaaaccctgtctccaataaaaatacaaaaattagccaggtgtggtgacaaacacctgtaatcccagctactcggaaggctgaggcaccagaatggcttgaacccggtaggcggagattgcagtgagacaagatcaggccactgtactccagcctgagcaacagtgagactgtcaaaaaaaaaagatggatggatggaaggaagggaggaaggaaggaaggaaggaaggaaggaaggaaggaaggaaggaaggaaggaggggaagaaaagaaaaggaaagacaagggaagggaaagacaagggaaggcaaaagaaaaccaattttcatcctcttgactcacaagtttgagtctagcttttccctttgtctgctatcgtcttttggattatgagtttctcctaatatctcatgatatttcaatgcgaggtaattgcaattaattatcatagcaacactttatctgtcttctaagaaaataagtgtcccacactggggcctgtaggagtgggggtaaggggagggagagcatcaggaagaatagctaatgcatgctaggtttaatacctaagtgatgggttcatctgtgcagtaaaccaccatggcacacgtttacctatgaagcaaacctgcacatcctgcacatgtaccccagaacttaaaagttgaaggaaaaaaagaaagaagataggtgttccaagaaaaaaaatatttaaaagataaaatatgtggagcattacatcaggtcttagaatgcgttcttggagggagaactattattgtttgcacttatctgctgcgaagatatatttcaactctatctaatcccggtgtcacagcaccagaggatgctaaagattaccattttcaaatgagccagctgaggctagagaggctacctgattgaccaggatgaaatctaagagttttcccaactccaaagttagtattctttcctctacattatcctgcttctcatttatctcattaaaattctgttagctgggatgtgctttatactggagagcacagagaacaatctgtataaaaggatttgcaagagacccagggagccctgaaactgagatgattttccccacaacctatcctgctgggcatggtacagatagacacattcacatcttagcagatttgggactttaagggcctcttattaaaatgtaaatatgcctggaggaatcactcctaaacccatactgggataacattttatctcagggattagttgatcaaattggtttccaacctagagagttgacagcaataccctaaggtgaagagggggcactacgggtgggggctgtcagggtaggcagtgcaatataacaggtttctaaaactttcccttctttacagatttaaacaggaacagctctgtctaatttttttagctctgaatattttaaataaagtgactacttaacaaaataaattctgagtggataggcagaatcaataatactgcaagcttgaatgtaagcctagtgacaatgacatgggtctttagactatttgataagagcttaaattgaagttaagatctgagcttgtgaaattttaatgtttatatattataagtgaagcagaatctattcatttttctgtgctctttttttaaactcagattttcgataagataggaagtccagattgcaatttaaaacatctcattttttatgcaaattgagggaatcctcaatttgcaaatcactattgctgagtaaatttttaatttttaaaagttctgccttccattaacatgatcgtcagtaataattgtattctgtttgttccctctgctttttattcttttccccaccttcctgtgggttgcctgaatatttgcttagaatttcattttgattaatctatagtattttttagtatacctccttgtacagattttttttagtggtagctctagatagtttacacacatacatatacacatacatatataaaataaaatttatatacatataaaatatttacatatataaaatatcacagtctggtttcaacattttacaagttcaagtcaagtgtagaagctttacctccctttacatccctctccctttttataatataattgataattctatttatttattctacatacattgataatcacatgaagcaatgttataattttgcttcaaacacaatttaggaaacccaagaggagaaagaaagtctattgtatatactggtatttttattatttctgttgttctttcttccttcctgatattttaagatttcttcatttaaaaaaaaaatcattttctgtctgttttaaaaacttccctcagccattatttcagggtaaatccgtttaaaacaaactcttagttttccttcatctgaaaatgtcctcatttccctttcattgttgaaagatatttttgctggctatagaactctgagttgacaggtattttcacactagaaaaattttaccacttcttctggcctccatggttcctgaagagaaatctactgtctttaaaagtgcttttttttttctttctttctttcttttttttttttcagatggaatctcactctgtcgcccaggctggagtgcagtggtgtgatatcagctcactgcaacctctgactcccaggttcaagctactctcctgtctcagcctcctgagtagctgggattacaggcatccaccaccatgcctagctaatttttgtatttttagtagagacagggtttcaccacgaaagtacttttctcctatagatgaagtagtgtttctttctcatagctttcaacatggtgcttttgtccttagttttctgaagtttgactatgaggtatcttggagtgtatttctttgaatttattctatttgggatcactcagcttcttgaatctgtagattagtgtcgtttgtgaatttggggacatttttagccattatttttcaaataatggcttgacttcaatggcacaaatattagatcttttgttatagccaatgggttcctgaggtgctgttcattttttttccagtctatttttttctgcttttcagattggccaatttctattgttctatattcttgtacattaatcatttcctctgttctccctattctgttgctgagcccatcccttgaactttttaaatttttgctgtatttcttaattctaaaatttctatttcttttttctttttatactttctatttctttgctgaggtttctattttttcatttgtttcaagtgtttgtgtaattgcttattaaagcatttttattacagctgctttaaaatccttgtcagataattctaacatctgtgtcatctcagtgttggcatctgttgattgtcttttctcattgaagttgggattttcttggttcctggtatgaatgatatttgattgtatcctagacattttagatattatgtaatgagactttagatcttatttgaatcttctattttattagaatattctgtttcactagagtactttaaccttttactgatggagaagaagggggtgatgccttgttactgctaggtaggggttgtaagtccaggttccccatgtggcatccactgacagcaccccaatagagaggctgggacacctcattgcagcctgatgagggtggaactatagatttcctactcaaccttcacagtaggggtggggctgcagtttttttcatggtgtttgcctggagtagagtgcttattgtcttaatttttttgtctttctagtcttccacttttctggtcctttggctagggagagtgggcttttcttgaggatttttttttttttttttttttttttgtctttgcctgttggagtttttagattgctggcttctccggaactaagtctgggatatctgaggcaaacaacaacaacaacaaaaaaacccactgaactcactgctgtgtcttttcttaggtcctgaagtccctagctggtctgccttctctccacctttcagagtcttcttatgtttgttttataaataatgctcagggttgttatctgtacttaacaggagggacagggagcagtacatctactcctgctggtcctagagctggaagcctccgcattctcacattcctacgcctctgctaacagcgctggctccttatgacctactgaatcaagacccctctgcttttggctctagaaagtcatacacctttctctaggactctgtgacctagatattggcagacacaaaagattctcctatagaactttacttcaaatctgcaagtagactgaaagctaaacattgttgtttgttatacttcactgtgcccagcagaagtactattagtggaatttctgcataacgggataatacctgggggacgctacctgttgcttctgactgcttccttgacttttatgtattttcctgtaacaggtgaaatacatatgggaggtcaagaacatttttatatggaaacccaaagcatgcttgtcgttcccaagggagaggatcaagaaatggatgtctacgtgtccacacagtttcccaaatatatacaggtaacatggggccattgtggagaggacatggctaaatgatttctggccagtgaaatatatcaagagcaattagaggtaaaagtatatttgggaatttgaggtggggggattgcttgaacccaggagctcaaggcttcagtgatctatgatcacaccactgcactccagcctgggagatagagtgagaccctgtctctaacacaaaacaaacaaaacaaaaccaataatgttatttcttcagggactgaagaaatattgagtattaatagccatattgatttcagtattaatagccatataagttcagtgcttttaaaagagtgttattaaagtgggagccttttgtttgtggattgtagctttaaaaccagttatggaatcagcagatctcttgctcagctcttggcaccactgttaggaacacaagagaagaaagaggaagacctgctctccaaagcctatggtgcctaactcacaggaaacagttaagaaacaatattgaaaattatgcaaccaggtgctaaatcagcaaaggcaaaatttatgtgggtggagaaattaggaaagagtttgctgagggctagaatcatccaggaagtcccacaaagaagtcttaagtttggattcagaatgagagtgaggtttgtctagatggtaagacaagagaggtcacttccaggcaattccacagcaagatcaaatgacacccattcatttattttctcacctcttctgcaaacatttgttgcctgtgtcctgtaccctacgcagcatgcatggaaggaaggaggaatagcacaatgaccgccccagctggaatgaaggggtgcctttaggaaagctaggtttaagcatcagggtgagagtaagggaaatgaggcagggggtcttgattctggtcataaggagccagtgctcttagcagaggagtaggaatgtgagactatggagaatgaggcctcgtaaaaggcaggatcctaaagagggtcagacgaactccattccaggcctgcttttctcttcactctccgtgggatgttgggtccataacctcatccgtctcaggcttcccatctgtaagaatcaattgttaagactaaatgacccctaatcattaggatggcagaaaagagtgagatctgcatctaggaaagaccaactggtcatctttagcagcaatccaagcaagaagtgagaagtgctttttttttttttttttttttttttttttgagacagagtctcgcttggtcacccaggctggagtgcagtggtgccgtctcagctcactgcaacctctgcctttcaggttcaagcgattctccggcctcagcctcctgagcagctgggattataggcacgcaccaccatgcccaactactttttgtatttttagtagagatggggtttcatcatgttggccaggctggtctcgaactcctgacctcaggtgatctgcctgacttggactcccaaagtgctgggattacaggcatgagccaccacatctggctgagaagtgcttattttccagtagagacagtagaatgcagggaaaagacccatgctgagtgaggcttagaagactgcaaaatcccacagctttgggaaacgtatgcctagggattagtgtgaatagaatactttaggagtggttcctggggaaaatacaaaaaagtatgagtacaaaaatatctcactggtaatgaaaacactactaattagttttggcaatgtcattatagccaagtattgctgagatcagttggggctgtgggccagggttgttggacattatcccattatttagcataaccacacagtatgggtatcatgtgcaacattaaagaatcaaaacatctagtgactgtcacagtccatttcaggggacaggttttttgttgttgttgttaaaatcatagatgtgacaatgacagtcacaattaagtccttgctgaagatggatcagattaatcagaactattattgttcacaggacattgttgcctcaaccttgaagctcccagctaacaaggtcatgtgccatgtaaggcgtgttggtggagcgtttggagggaaggtgttaaaaaccggaatcattgcagccgtcactgcatttgccgcaaacaagtaagtggagaaaatctgctaaaaataaagtgaagtcacactgaaagttctcactgtcagaatcaatgaggaagaacctgggccaagattatttaatatcacatatacgatacaaacacacaaacaagctgccagcttattacacttacttgtcttatattgtcctatagcaaccaaaataagagtcaattactgaaaataataaaagccacagaaaaaatataatacctagaaagtgggcagaaacaggtcctgaatgggtgggagttacttgtcctcagcacctgctggactgagctatatatgtagaggtcatatatatggctttttgaacaatgtacctatatatacatacacacatatatatttatatacatataaaccatgtacctatatatacatacacacatatatgtttataaacgtatatgtatgtttgtgtgtatatatgtacattcttcaatatatcaaagatatttttgtaaaatggggtcccatatacacacatacatatatacatatatgtacatatacatacacatatatacatatacgtgtatgtatatatgtgtatatatgtatatgtgtgtatatgtatattttcttgatttaaatatagactttgcttttgttatgcttacattcatttgtatcgccattttcctttgaggatctcaaaaaattctcatgtaaaattgtctctggagcaggcacacctagaaggcttaatttgtttgctgagtaatatgggtcagttcctccatcccaggaagcaaaaataccttgattccagatctctcctatcagggagcacttggtagttagatctgcattcttccatttgtggccagtctaaagaccttgggacgatttgcctataataaaggttgttattacaatgggaaatgcccccaaagcaatgtcctggagcccctggcacccaagagcctctgtcccacaagttgcaaatgcctggcattattccctgacctaacgggaggaaagcccacggtgtatgcctgagatcagcagaggataggcatgcgaaatagttgtgttgttctgtgaggcgtgtaggctccactcaggctcttgccaggagttatataaaccccagagaatgcctgctaggtaaaagaggttacctcacttactttttttctgttttagacatggccgtgcagttcgctgtgttctggaacgaggagaagacatgttaataactggaggccgccatccttaccttggaaagtacaaagtgagtacaagagggcatggaggaaggatttatgttgtagatacaacatcctatcagtgcgcagggcagtctttggctactctctagtggggagtaacaatgagcaaatcaaaaacagagcatctatttaactttctattggttgcactgacttttaattactagctggttcaatggaggcttttctgcttagctcaaagatgtcagtttcagaaataaaacactaagtgctagctggtattggctgtacagagcaaataactagaaaacgtgagtgtgtacgccattaaagtagatctgattaccatacttcttcccacatataaaagaggtaaaagtagaataattctcataacagtagtgttatgtgaaattgcaattatttgtaaatgggttcctcattcttcaatatatcaaggatatttttgtaaaatgaggttccagaaattcatagaaaaaaatttgtagtagaaaatagtgattcttttgctttataagaaaaattttacttctcagagtgggctaacttctctaagaaacaacttaaaagctcttaaactttcattacgtcatttcttgctcaagtaacagctcaatataatgctcaatataatcattgaggggggaaaggggaggattctgctttataaaatcattcagggactggagctgtttccatttattggtgccactgtgccctcagactgcatcatccaatatagtggtcactaggagcatatggctatttaaatttaaattacccaaattaaatacaattagaaatttagctccatagtcgtattagctatattccaagtgctcagtaggcacatgtggttagtgtctgccatattggacagtgcagacgcagaacattgccatcatcacagaaagttttattgggtatcactgccctacaaactctgagtcttccaggggatcttttgctgagggcagcagacagggaagcgagagagaagagagcatggagtgtcacctggtaggtgttttaggttttaggcaccggacctgtaagttgtggatctcacttgtatccagatgtcattggcgagacctctgtcacctaactgtaagggaggctgggaaatgtcatcttcctgtgtgcccagaatgaaatacaataggatttgttaaatgcatagcactgtctccatcgcaaaactgcataactaatacatgttttttaggagataatgaatgtttccatttcaaaccacactcactctaaactgtattttgaatttgatttagctcagaaagatttgttacagtaaacttcatcctgaaggagattttttttaataagacatatatgaagtcattatgaaaatataacaatctcaggttaaaagatggagagatgaatatgaattggaatatatataggcactttgttaaagaaggtaaaagataggtcttcaagaatggaggccaggcacggtggctcaggcctgtaatcctagcactttgggaggctgaggcgggtgaattgcctgagctcaggagttagagaccagcctgggcaacacggtgaaaccctgtctctaataaaaatacaaaaaaattagccgggcatggtggcaggcacctgtaatcccagctacttgggaggctgaggcaggagaatcgcttgaacctgggaggcagaggttgcagtgagccaaaatcgcgccactgcactccagcccgggtgacagagcgagactccatctcaaaaaaaaaaaaaaaaaagaatggataggcagaaggaaggcatgccaggtgtgggaatagtaagagcaaaactacagaggtgtaataaacatggcatgtttgatagaggcaagagtaaggggagagggagaattagaacacagagcacttcctggaaggtagtaaaaaataggattgatgggtttaggtgatgcctgactgagaggggcctacagtcccagagtgggaagtttaaacttgatcttaaaagaaacagtgagactgagtggatccttgaatggctcagtgccgtaattaaacacagatgctttggggagggtaacaggatagtctggggaggagagaggatggaagctggtagacagcgggaggcagctgatgcattcagacatgaagcacatggggtctgagatatgacagtaagttgtagaagagatgggtccaagagccattatagtgtaaaataaaagagaattggtgaaaatcttggcaaaatgctatgaagaatacaaccgcaaacatgacttggagggttttagaagaaagcgacaagttggaaggaggaaccgatctggaagaacgatgaagagcttgtttgtgtaaatgctgggggtagaagtgacaacaggaccctgaagcagaaatgtcctttaccaccatgggactttgctgaaaggactggattatagtgacagaagccattgtcataatggtgactaaaactatgagaaaataatgttttctgatggagagtagtgtgaggaaaggtgatatgaatactacttacgatactattattaattatatttagagtacttgctatgtttcaggcacttgcctataattttctatgtgttgccttatttacttccatttcacagatagtctgagtggttacacagcttgcctaagatcacagagctagttatatactatccgagaaatcactgccaaatccaatgtcatgacgcttttcccctatgtgtggagggtttgcaaatgacaaaatttggagagacttggcccctgttccagcattcgatatcggttctcttccccaggctggattcatgaacgatggcagaatcttggccctggacatggagcattacagcaatgcaggcgcctccttggatgaatcattattcgtaagtgttttaaggagcaagttcacattcctgaaaagagtgttacataaaataatttaacttagaaaatgcccaatagttaagtaatatttgattataaaggtataatgaccatccttgcagggatagccatgtgttacttcctggtgcccaaagtgtgagcccagagatgctggctaagttgcatctgtgtgttaccccccggcttcccatacttagagctcttttcctagatgcacacatgagaccaagctttctcagttttggccctattgacattttggagtgtgtagctctttatggtggggactatcctgctcattgtaccatctttggcctctacttagtaggtgtcagtggcattaccaccctgtagtctttttttatttttattttttgagacagagactcactctgtgcccaggctgtagtgcggtggctcaagcgatcctcccacctcagcctcccaggtagctgggactgcaggtacatgccaccatgcctagctaatttttttttattattattttgtagagatgggttctcactatgttgccagagctgatctcaaactactaggctcaagcaatcctcccatcttagcctcccaaagtgctaagattacaggcgtgagccactgtgtccagcccaaccccaaacaaaaatgtttcaaccaggccagacgcagtggctcacacctgtaatcccagcactttgggaggctgaggtgggtggatcacttgaggccaggagttcaagaccagcctgaccacatggtgaaatcctgtttctactaaagccgggtatggtggcacacacctgtaatcccagctatttgggaggctgaggcaggagaatcacttgaaccccggaggcagaggttgcagtgagccgagatttcaccattacactccagcctgggcaacaaaagtgaaactctgtctaaaaaaaaaagagtttcaaccaaaatgttaacaatgaaaaatgtctccagacattgccagacgtccccaggagcagggaaaggattgctccccattgagaaccaatacattagacccaatgccaaaacatttttttctgttttcactgtcttccaggatattatattcattacattctatagacccagtgctcagggcctgtgaacatatcaaaggcctttgtatatatttgaaatcttaaaaaatgcattaactccaaaatacaaaaataaaaaataatgctctcaaaggaaaaattattctaatacttaaaaattattttacagcaaaaaatgtgtttaattgggggcatgggaatattttagcatgttagatgagatgaaaagagagctgccattttcggcctggttttggtctgaggtcgtaggatggtgaaacaggttcagaagatcttaatcacatcaactctggatttctccaggtgatagaaatgggacttctgaaaatggacaatgcttacaagtttcccaatctccgctgccggggttgggcatgcagaaccaaccttccatccaacacagcttttcgtgggtttggctttcctcaggcagcgctgatcaccgaatcttgtatcacggaagttgcagccaaatgtggactatcccctgagaaggtaatactaaatcagcttcacagacaaaacatgtggaatgtcagagacggtagggcctttgggggccattcaggttgaggaatttgagacccagaggggcaaatgatttgtgccaagtcccccagctaactggttaatgcggagcccagactccaaagttcagcaatactcaccttactcagactcctgctccaaaatcctgaagcagaagatcctgaggactgagcactgcattctcccctggctggtgagaagcttccattggctgggggtataactgctacccacaattccatcaaggccctcattccccgcttcctgaacatctcagccagctgtcaaaaagttggtcatttcagttgctaaactgatctccttttggttcttttttttttttttgtaacattaataggttggtttttatttttatttatttatttccataagttattggggtacaggtagtatttggttacatgagtaagttctttagtggtgaattgtgagattttggtgcacccatcacccgatgggtgtatgtatatacatatacacacgcacacatatatatgtgtatatatatatacacacacacacatatatatatatatacatacatacatacacacaccacagtttctttatccactcattgattggtgggcatttgggttggttccaagattttgttattgtgaattgtgctactataaacatgcaggtgcaagtatctttttcgaataacaacttgttttcctctgggtagacacccagtagtgggattgctgggtcaaatggtacttctacttttagttctttaaggaatctccacactgtcttccatagtggctgtactagtttacattcccaccagcagtgtagatgtgttccctgttcaccacatccacgccaacatgtactgttttttgattgtttgattatggccattcttgcaagagtaaggtggtgtagcattgtggtttcagtttgcatttccctgatcattagtgatgttgaacattttttcatatttttgttggccatttctatatcttgttttgtgaattgtctattcatgtccttagcccactttttgatggggtcgtttgtttttttcttactgatttgtttgagtttcttgtaggttatggatattagtcctttgtcagatgtatagattgtgaggattttctcccactctgtgggatgtctgtttactctgctggctgactgttccttttgccatgcaaaagctctttagtttaattagctcccagctatttatctttgtttttatcgcatttgcttttgagttcttggtcatgaaatccttgcctaagccaatatctagaagggattttccaatgttatcttctagaattttaatagtttcaggtcttaggtttaagtccttaatccatcttgagttaatttttgtataaggtcagagatgaggatccagtttcattctcattacatgtggctagccatcctagcaccatttgttgaaaaggatgtcctttccccactttacgtttttgttcgctttgtcaaagatcagttgggtgtaagtatttgggttctctattctgttccactggtttctatgtgcctatttttatacactactacaccattttgttgactatggccttatagtatagtttgaaatcaggtagtgtgatgcctccagatttgttctctttgcttactcttgctttggctatgcgggctcttttttggtatcatgtgaactttagaattgttttttctaattctgtgaagaacaatggtggtattttgatggggattgcactgaatttgtagattgcttttggcagtatagccattttcacaatgttgattctacccatccatgagcatgggatgtgtttccatttgtttgtgtcatccagtgttttgtagttttccttgtagaggtctttcaactccttgattaggtatattcctaagtgttttattattatcattattatttgcaactattgtaaaaggggttgagttcttgatttgattctctgcttggtcgccattggtgtatagaagaactactgatttgtgtacattagtcttgtatccggaaactttgctgaattcttttatcagttctaggagctttgtgaaggagtccttagggttttcaaggtaaatgattatatcgtcagcaaacagtgacggtttgacttctctttaccgatttggatgccctttatttctttctgttgtctgattgctctagctaggatttccagtaccatattgaagaagagtggtgagagtgggcctccttgtcttgttcccgttgaatgccttcaactttttcccattcaatattatgttgaatgtctttaacttttccccattcagtattatgttggctgtgtgtttgtcatagatggcttttattacattaaggtatgtcctttgtatgctgattttgctgagagttttaatcataaagagatgctggattttgtcaaatgctttttctgcattgagatgatcatgtgatatttgtttttaactctgtttatgtagtgtatcaaatttattgacttgtgtgtgttaaaccatccctgtatccctggtatgaatccctcttgataatggtggattatgtttttcatatgttgttggagttggttagctagtattttgttaaagattttagcatcaatgttcatcaaggatattggtctgtagttttcttttttggttatgtcctttcctggttttgttattagggtgatgctggcttcattaaatgaatttacttaaggttccttctttctctatcttgtggaatagtatcaaaaggattggtaccaattcttctttgaatgtctggtggaattctgctgtgaatccttctggtcctggactttttattgttggtaatttttaaattaccatttcaatctcgctcttgttattggtctgttaagggtatctaattcttcctgatttaatctgggagggtgtatttttccaggaatttatccatctcttctaggttttctagtttatgtgcacaaagttgctcatagtagctgtgaatgatcttttgtatttcagtgttgtcagttgtaatatctcctgtttcgtttcttagtgaggttatttggatttttactcttcttttcttaatcttcctaacggtctatcaattttatttatcttttcaaagaaccagctttttgtttcatttatcttttgtactttttttccagtttcatttagttctgctctgatcttggtaatttcctttcttctgctaggtttgggtttggtttgctcttatttctttagttccttgaggtgtgaccttagaatgtcagtctgtgcactgtcagtctttttgatgtaggcacttagggctatgaactttcctcttagcaccgcgtttgctgtatcccagagattttgacaggttgtgtcattattgtcattcagttcaaagaatattttaatttccatttgatttcatttttgacccaatgctcattcaggagcaggttatttaatttccatgtatttgcatggttctgaaggttccttttggaactgatttccagttttattccactgtggtctgagagagtgcttgatataatttcaattttcttaaatgtattgagcttgttttatggcctatcatatgatctatcttggagaaagttccatgtgccgttgaatagaatgtgtattttgcagttgttagataaaatgttctgtatatatctgtttagtccatttgttccaaggtatagtttaaatccattgtttctttgttgactttctgtcttgatgacctatctagtcctgtcagtggagtactgaagttccctactattgtgttgctgtctatctcatttcttaggtctattagtaattgttttataaatttgggagctccagtgttaggtgtgtatatgtttaagattgtgatattttccagttgtacaaggccttttaccattatataatgcacctctttgtctcttttaactctgttgctttaaaattggttttgtctgatttatatcagacagaatagctactcctgctcgcttttggtgtccatgtgcacgaattgcctttttccacttctttactttaagtttatatgagtccttatgtgttaggtgagtcttctgaagggaacagatagttggttggtgagttcttatctattctgtggttctgtatcttttaagtggagaatttagaccatttatattcaatgttagtattgaaatgtgaggtaccattgcatttgccatgctttttgttgcctgtgtactttgttttttatttttttgtttttgctttttaacatgtatttatgttttataggtcctatgtgacttatgctttaaagaagttctgttttgatgtgtttccaggatttgtttcaagatttagagctgcttttagcagttcttgtagtggtggcttggtaatggtgaattctctcagcatttgtttatctgaaagcaactgtatctttccttcatatgtgatgcttagtttcactggatacaaaattcttggctgataattgttttgtttgaggagcctgaagatagggaacaatcctttctagcttgtagggtttctgctgagaaatctgctgttaatcatgtaagttttcctttataagttacctggtgcttctgtctcacagctcttaagattctttccttcatcttaactttggataacctgatgacaatgtgcctacgtgaagatctttttgcaatgaattttccaggtgttctttgtgcttcttgtatttgatgtctaggtctctagcaaggctggggaagttttccttgattatccccctgaatatgttttccaagcttttagaattatcttcttcctcagcaacactgattattcttaagtttggttgtttaacataatcccagacttcttggagattttgttcctattttctattcttttctccttgtctttgttggattgggttaattcaaagaccttgtcttcgagctctgaatttctttcttctacttgtttaattctactactgagactttccagagcattttgcatttctaaaagtgtatccaaagtttcctgaatttttttattgtttttttctttaagctatccatttccttgaatatttctccctaacttcttgtaacttttttaaaatttctttgaattgggctttgcctttctcttgttcctccctgattagtttaataactaacctcctgaattctttttcaggtaaatcagagatttcttcttggtttggatccattgctggtgaactagtgtgattttttgggggtgttgaagagccttgttttgtcatgttaccagggttgcttttctggttccgtctcatttgggtaggctctgtcagaaggaaagtttggggctgaaggctgttgttcagtttcttttgtcccatggaatgttcccttgatgtagtactctccccctttccctatggatgtggcttcctgtgagctgaactgcagtgattgttgtctttcttctgggtctagccacccagcaagtctacccagctcccggctggtactgagggttgtctgcacagagtcctgtgatgtgaaccgtctatgggtctctcagctatggataccagtgcctgttccggtggaggtgatggagggtgcagtggactccatgagggtccttagctttggtggtttatgctctatttttgtgctggttggcctcctaccaggaggtggcactttccagaaagcatcagctgtagtaatgtggagagggattggcggtgggcagggccctagaactcccaagattaaatgtcctttgtcttccactaccagagtgaatagggaaggaccatcaggtgggggcagggctaggcatgtctgagctcagactgtccttgggtgggtcttgctgtggctgctgtgggggatgggtgtgagattcccaggtcactggagttgtgtacctaggaggattatggctgcctctgctgagtcatgcaggttgttagggaagtaggggaaagccagcagtcacaggcctcacccagctcccatacaagcagaagggttggtctcactcccaatgtgtaccccccaacagccctgagtttgtttgcaggcagacagtgtgatgggcttgaaaacttgccctgtgctgcacccctagctgagagagaaaagggcttggtttctccccctgcctgtggagtctgcacaccagatttgtgccctcccactgagctctgaccaggaggcttcttgccccattcaaattgttacaaagttcagctagagatttctttctccctgtggagtttcaccccctacttctctggtcccccgccccctccgcccccaccatggatccctgtgttgttaggcaggaatggcctggcctgctaggggacacagcaagctcctagggcctttctgctgcttcctctacccctgcattttgcttggctctctaaattgtctcagcttcaggtaaagtcggaatcttctcctgcaaacagaatttcagcttctcccgtgggggtgtgtgtctgggagaggaggatctcccttccccctcacagctggggcactcacggtatttggggtatctcctgggtcctgcaggagtagtccacttccttcagagggtttgtgggtcctctcaggattattgctttgttcttgcagtcgatctagagctaaaattcggcgaacttccacaagctgctctgtccagagctgcaatctagtcctgcctcccgtccgccatgatgatccaatttctccttttggttctttcagtctcagccccaactttgtttattgacaacgaccttccccttcctggctcctcctcccagatcctggaatggaattagtgtggggagatggggtgagctctctctcagccccttctcctcccctgtgccttctgctgtgatgctggtgcaaggaggaagagaagaaggaccaggaaaacagtcagtttctccctgtgtgacttctcccggcaagctcacagtcctctctttggacagatgtcacttttcaagtacattgtctatggctccatttctgccagctcttccagaaattggcagtccttggaccttcagcgggcagctggcacagcattccactggtgaccacacctctctgctcatgccccagcagtctttagaaggccccaggtcccaattcatctaccagctttcacccaacagtagccactttctttgcttctcttgaacgtgtgggaggccttgcccctcccttcctggccatcccactaaactctctcctgatgtcctgccacatttggtagcactaaggaggagaattacatccttcccttcattcccagggaagttagagcagggaacagcctcttaaaaacaccactttcccccaaatgagatggcttactaatttccagtgtttctcttacaatgatctgataatttgcttcggagggtggggagagtgtgtctgtgatggctctgtcagcttagggagggggctggccacaagtgctatgagttttctcagctgagaatgtgacatacttggcaccttttattctcagcttagggtcttagtcaccaattctgggaatacaggaagaattctactcagtgcttcagacatcctgggatagaatcttttaatttgttcttcatcctagatattggttatatttaaacgaactttcatgcttgcctgttttggaggtgagtagtcttatcttgcaacatagcatgggagtaatccaaatcatgtggcctagatgatctttcagcagatacccaaatgcaactagaattaagagtctacagtgtacatggactgtgttgagttatattggaacataaggtaaaggttccatcctttaaagttgcacaagagtagcatagaaagcacataagtaattgctagcacgtttgatagaagctctgagtagaggaagaggacaatgttgtgcattaggaaaggcttccacaaggactcagtagaacttggcttggaccttacaggatgggcagaatttgaccaggaggatggtgaatggatgagcctatgtctgctgggtttcccctcccagctttaatctccttttctttcataggtgcgaatcataaacatgtacaaggaaattgatcaaacaccctacaaacaagagatcaatgccaagaacctaatccagtgttggagagaatgtatggccatgtcttcctactccttgaggaaagttgctgtggaaaagttcaatgcagagaattattggaagaagaaaggactggccatggtccccctgaagtttcctgttggccttggctcacgtgctgctggtcaggtgagttctccaaatgcacatgaggatgctgcctggaagcagccctgacaaagcaagaggtgttgaggaaacttctccttaagtcatattagccatatggttgcaatgcccaattgttaaatttcacaaaagccaccaaagtcaaagtaattaagctagctttactccagaggagaccagagctcctctgctcacatgcccatggttggtcaaaaacattcttgctggaaattgggagactgaggtttactcctggccctggcaacaggagttggcaaatggcagctgagtccatttgctctgggctcagactgctcatgtggaaagcaggagggtgggactgatgacctccaagactcctcttccagtgtccgcaattcggtgtcgctggaccatgaaatagaaatgaggagctgcaaggttttgggtgctccactccttctgggtgggttggaataaattaaattcagaaaaataaatcactttttaaatagaatttttgaagtttattcaccttgtaccttttaaaactgtgaaaggggggactgggaatctgctcttgcagtttaatttctttcattgattaaagaaatccccttgcttggttgcagtttccacctcttcattcttgacttcattcattcttaagaatgaataaaacttacccctaacggctggtgaaggactgcaacattctagctcattgtatggcagccgggaacccctattatctattttattacatacacacatccatgtacatacagataagctgggaggaccctcacaattgtcactcctctttgcagaattcactccttggttggagtcatgaagaaggcatggcagctgtgctgagcgatcacaaaataggaacaaatggcagggtaggggagcttcgagaggggcgttagtgtggatgttgtgtgttaagggatcagaagaggccaggaaaagtgggtaggaaggtcctttcctccatcccatatccatccattcacctaactgtcctagttgagctttggtgccatcctgagaacatttgcatgcagctttgattgtaggcaggtggtaggtcagagaagtgttataacaaatgatgatcttattgcagtcttctcattccttgcctgtttgtgatggcaaaaaataacacagagccatgtagtcatctgcatgcagtttactcaaatgtgggagacagtcaagatactgtggttgagaaataaaagcaaaaacgaggttattacaaaagaagagagaaagaaactaccactgggaaaagggtttgtaagcattgagtcttggtatagaattttggggtaaactgattagctggcagctaccaaagaggtcagctggggctgtctgtccttgtgcagactagtcaggatcatcaggaaaaacagcctccattgttcatggatcctctggaaatcctctcacgtttggccgtgggtaaacatggcgcactgcctctatttgatggctgccattactttatatctggcctccaccatagaccaggtctcacccattttcctcatcagaattttctcaaaaagtagatttgaaaaatatggtgaggtgcagtggctcacgcctgtaatcccaacactttgggaggccaagacaggagaattgcttgaggccagaagtttgaaaccagcctgagcaacatagtgaggccccatctctacaaaaaagaaaaaataataatagtgacaattactgagcactacgatgttgtaagtacttttaggtatttcatttaatcttgggacaacctagaagatttgtatcctcattttaggtataaaaaaaatctaggcttagaaggtttaaataactggctcaaggtcctgcagctggtagaggtaaggctggggctagaactcaggcctgagtggctctgaaagctgggttttctagttacaccacgtggtctccccaaaacaccttttgataggaactgaagtgggattcagctcagctgagaacaaactaggcaacagccagcagtacaaattcattcttgaaggccacctgggaaactgaccaacttacgtgctgaaaatatttacttagggctgaatcaaggagtttgagaccaaactccgtggagggcacatgctaaaagcctccattctgaaacaaactaaatagaggaggaaactagacatgatatttgagtgccttctccatggaaggacctgggctggggaatttgtaatctccacttgattattctctatctcatctctatcaggtaggtatgaatctctctatttcacagaaggggaaactgaagctcatagggattctctctgttgcccaaggacatccagccaataaatggcagaacaaggattcaacttcagcaccgccttcatcgtcccacagggcctccctgagcagaggcagtccctgcccagcagctgagggggtcaaacgtgccccacctgtgttatgcaggcataccttgttttactgcactctgctttattgcacttcctagatgctgcattttttacaaattaaaagtttgtggcaaccttgcttcaagcaagtctattggtgccatttttccaacagtatgtgctcactctttgtcaccttttggtaattctcacagtgtttcaacctttttcataattatggtgatctgtgatcagttatctttgattttactgttgtaattgttttggagcaccatgaaccacatccatataagacagcaaacttaataaatgttttgtgtgttctgactgctccacaaatagaggagcattcttcccccatttctctccctctcctcaggcctccctattccctgagacacaatgatattgaaattaggtcatttaataaccctgcagtggcctctaagtgttcaagtgaaaaaaagagtcacaagtctcacttgaaatcaaatgctagaaatgattaagcttagtaaggaaggcactgcactccagcctgggtgacagaagagaccctgtctcaaaaaaaaaaaaaaaaaaaaaaaaaaacagaaaagaaattgttacaactacctcctcaatcgtcagcaaccaccaccctggttagtcagcagccatcaacattgagaaaagaccctccaccagcaaaaagattctgactctctgaaggctcagatggttgttagcattttttaacaaagtattttaaaactaaaatatgtacaatctttttagacataatgctagtgtacacttaatagagtacagtgtagcataaacacttgtatgcactgggaaacaacgaaaattgtgtgatttgctttattgctgtggtttggagctgaacctgcaatatcagtgtacttacttcctgcagtctgaacactgaatggcacagacaggacctaaccaacctctgtgtgtccaatgccttactatggcacttggcacagagtaggaactcaaatgtctgaatggctgaaacatttggggaatctgcgggtttgaagctaacttctcatcgataccagtagtatttgtttgaagatttaaatttccccgactaggtcctctacttatgttggaggaccatctactccagctctccagttgtgcttgttttatagatgaagctttgcagaattatcttttgtggcactaacaatgagctgtacagtggtgccacttaactaaaccaaatttgacattttaaatggcccaaggagattgcagcaccacatggaacaaatggctgagtgatatctgatagacatgctgtcttggacatacaggctgaatgctataaccagcagggtcacacaatgttggaaaagtataatccactataattgtagcttaatcacatgggccaagtccaactatgaattacatgcacactttgcgagccaaggaggccaaatatggagtctacaagattaagaaacagattgcatggctatgctactgcaaatttacttaccaaacatttactgagcacctaccgcatgtgtgttgctatgttgcattccgagagattccttaggacgtgatccttcctttcagggggctcatattctagcaaagcacaatgaagtgccatggaatggggcccaggagctattgttgcagctggcatcacctgacatctgatgcatggcccccaggcagccagccctgggctctctgtagaggaaaactcttccttacctttattattttgaggatgaatgtccaggagcaaaagatggtgtttccaggagtcatgagtcaataaacagtaaaaaacactctattacatcttcccaaggtccttgggtgtcattatcatggctactatgccttcctcaagagtctaagtttctcctttggactgtggacatatgtgcctggtcctcagagaaagggtatcctgatgtccccatttgcccagtacatccctagtttacacctgccgaccaaataaatggagtgcattttcactgtcaaacttgccttatttggaatgatagaggtttctggttgtcattcacgggggtaatgtgaacctttggatacaaataaagagacagttctccaagcatggtccacggtccccaggcagcttggaaggcccttctgatgggcagagaattgatctggaaatgcagtctttttcttgggtttatctggtgattaacatgcagttccatcaaccttcacttaatgaccagggttgcttacaaataatctaagtgagcaactaaggcttaggaaaatttttggtttattaagttgacattggcttattaccagaattttctgaagaccttgacattacaaatcctagattattatgtcactctgcctaaaaaattagatgtgaagaaacctagctgacccagaccacacccatgcggtcagcacttccctgctgcaaaactgtaaaggttgccttgcaggctttcccggaccacagtggaaccactgagagatatctgttctaggaggaccattgctgctgatgttgctcttacattgcagagccaaagggaagaagccatccttctttcctgctgtgattttctgggatatccccatattctagtttagcacaggcagatacgcaagaaggcacattcttgttaattataaaaacatgtttagcttagagactggatgtttctgattataagagtctttaatgctgttagcagtctggttccttctggatccttgtggggagctatacagttagataagattacttccaagttcttgtctaactccaaagctctgtagttctgtgccaagatgatttagggtgagcttagtcattttgcagcaaaacaattttagtgtctatctatctcatcttatatgggattataagaaaatggatttccattttcatttttctgggacatgcctacaactatgagaatatgtgtgcacacaattattcaccctctccctctacctgtctatactttactttgtattttaaaatagagtccccgccctggtttcccccaccccaaaaagaaacctaaaatgttgctccaccctggggggtgcgggattcttggagggaaatatttccaaggaaaatgttttaattgacacgatatgtgataatatcaaaaagatcacagaaacagttttcgtcttttctgctcaggctgctgccttggttcacatttatcttgatggctctgtgctggtcactcacggtggaattgaaatggggcagggggtccacactaaaatgattcaggtaagaatgcaaataactcgattgagttgggtgtgtgcttatagatctgttcatgagagaaaaactatgaatggatattttctgttacaaaatacaggataggaagctgggtgaggtggctcatgcctgtaatcccagcattttgggaggctggggtgagaggatttcttaagtgaaggagttcgagaccagcccagggaacatagggagattccatctctaccaaaaatatatatatatatatatatatatatttttttttttttttaattagcagggcatggtggcatgagcctgttttcccacctacttgggaggctgaggtgggaggattgcttgagcctgggaggtcgaagcctcagtgagccaattgcaccaatgtactccagcctcggtggcagagcaagaccctgtctcaaaaagtaaaaataaataaaaaacaaaggataggagatttgagctttgacagtttactctgttaaatgattagcagaaactgggtaaacaaaccaattttgcaactaaacccctaaaagaatgtggcagaagaatctcgagttgttttattgctaaagaaaattatatgcttatttgctgctttcctttggatatagtgacagttgagttgtcctttctgagtttttcttgggcaataagataatgtgtaaattctgatgtatttggattatttcttgccctttttgtattacaggctccgaacaattgctaatataaatcacctttgatatttacagtcaaactttatctgtttgcttttggctgtcttattttagattaattttaagctactgtttctcttttgttaatcataatagtaacattatagattataaaatatttggaagcagcagaacattttaaaaaacaaagaccctacacagtttcaccacatagaataatcattatttgggagtctttacatcttgtcttttttgcttttgcaaaaaagtcaccaacatgcttttgtttaattttgtattctgtttttccacccactttatatagcgtgaacactttctcctgtcattaagcagtctttacaatcatgaattgtatgtggctgcatgtggatacatatatgatttatttaaccatcccccagttgtttgaatacttcagtgaatatttttgtacactaacctgtgatcaaatcattgattgtttcttaaaatagacttctgggaatagaattactgggtcacaggtgtgaccattttaaattgtttgacacacattatcaaattgttttccagaaagtatccctctcatgacacccctaaccaacagtgaatgttatggattgttgaaaatttgtagataatttgataagtgaatgaaagtatctcattattgctttcatttacatttttctgagtataaagatgttaaatacatattttctctcagtcacttgagaattgactttccccattggagggtaagatttcagtgttttccttattggatcaccagagactttgatattctaagcctattgcactctgtgtggatgatctgagagccagacctcatggaagggctctgtatgcctgtgtccttgtagaagctgtgggcaagcactttcaagccatgctgctagcaggagagaggcaagtttgggatcaactaaagttagcaatatgattttgctctctagcgctaaaaataaagaataaagcagccagctaagtccttgtgttggcacatggcactggcgccatctcctgtgacccacatgttcatgccgttgcttttccaaggccatcgtcctttctcataggaagcactctttccctggggcaactccagaaatgtggataggagatagacatctcctatcattgataaggttctgctagaattttgcagagtgtggtcgtaggagaagcctcaaagatgtcaatatcatgattataaaaacaagaatgaagcatttcttcctgccttggcctggggcctcacctcctctttctgacactatcaccagaaagtcaaagaaaaagaaagtgtgttcaggacttggggtccagactagctataggatttttagaaacaagaaacttttcatggctggaggaatttgtggttctgctcccttgtccctgtcatgggtatgagggtatcacacatgtgttaccacgtgggcatgtgcacaggtctgtgactaatcaaagtgtttaaaaggaaactctctcttaaaattcaggtggtcagccgtgaattaagaatgccaatgtcgaatgtccacctgcgtggaacaagcacagaaactgtccctaatgcaaatatctctggaggttctgtggtggcagatctcaacggtttggcagtaaaggtaacagtcactgcagtggcgtccaaatcattaactccctcagggccaaatacgtgggtgggtggagctccaaagatgctgagagttaatccaactcatatctccttccccatcttgccctcagtcagtggtacagcacccagtggttctcctgtgctggaaatgccacctctttttctccctcactcctgacatttttctaatcagcaagtcctttcaagtctactcaaaaatgtctctgtctttctgcttccatattatgttagtatcactttaagacaggctcgcgcctctccccagggccgatgcaggacttctgtctctccaccacaacttcattgccttttgctctagctttctgctgccggagtgaattttctcacaaaataaatgtggccatgccatgtctgaaagcaatggctggtggttttccaagaggttttttattaagtcttgactttttagcatggcttacaaggccagttctctctctcacacacacacacacacacacacacacacacacacacacgtgcacacactcatatgaaacctttcatatcaccttcatacagggttggtgtcttatttttccatgttccctcttagataagcctatggaatggtacatattatgttgttttgaatttggtgtttgcatgaaattaggagcataattttaatttaaaaataatctctaggatgcctgtcaaactcttctaaaacgcctcgaacccatcatcagcaagaatcctaaaggaacttggaaagactgggtgagaatcaatggttctctgtattttattttagaagaaaaaggagtgggaggagagcaagagcaatgtgcattaattgaaatctgtagaaagggcatttgcaaaggtaccaccattgtgtaatgataaataaaaggccctttggctcttagcatgtggaaatcctatcacagtgtggtggaggaactcttgtatctgggaaaattttctgttagagaaaaagatggttcttctgccagaactcctgttttaatccagaattaattaatgtttcatcctatgtagcctaggggttgtctagataataactgtacatctgttttttctctttctttgggttctgctgttcctaaaatagaaaaacaatagtagaaccactctgtaaaagtaaaaatcatataagcactcgtttagaaataggaaaccaagccagtgggtatatgttcatccagtaataggtactcaatggaatggaaatactcaactgcttcctttgatctgcttataatctagttggaaaagaagacacattctaaagtcagctaacaaacttttcaaagtaatagtttatcaactaccagatgttgtggaacaaatatccataaaagctgggagcatgtgtcacgctggctattctagaatgtcagtttttgcaaccttacaaatacaggtctgggggaaataacatttgaggatcccacttagaaatggtttctgctattccatggagtaaggactcattttataattcatatttatggggtctgtctatacttcctgggcatatttgtttctgtcctctgtcccatgctgcctgagcccagaaagcctgagtcagtgtggctggagaaagctggagagaggtgcagcatggagagtagtactccaccaccatgagatgcagccattcagcccactttcttcgctaatgattgatgtgcttctgaccttcattcctagacttagggacttggacctgaccctgatttttgtgcatagtagtcagctctgtgtactgcagagttttggtgtaaatggtacaatttagcaaaattattcccctcacctgaaacaaatgtgtccagaaaggattgacagttcccataaatatgaattataaaatgaacccttactctatagactagcagaaacctgatattaaaattaagcagccaaccaagcattgttttctaaaatgtcccatcttaattgaaaattttctgcagatgactgagtgaatttcttcctaagtggaacatatgttgatgactttagtccagcctgtatcataccacagcgggcatttagtacaatcataggtgctgaacaaacagctacaagccgtgaaccacagaggagaaagccaaaaggaatggattaatctgggtccttcctggttactattgctgatagttttatttaacacacagggtaaaattaaaattgaagtcttgagtgattctttctttgggcatccttgttgcatcatgctatgctcttccttcacaggcacagactgcttttgatgaaagcattaacctttcagctgttggatacttcaggtaaatactccctctgatcacatgctatggagaagaacagtggtatcttgaggaagagtttcagttcccttgcaattttggcaaacgttgactttctaccttctatttacccatggttataaagaacatttaactgctagttaatccatggttgtggttataaagaacatttaactgctagtatccagaaagacttctgttaggaaaaataggcacacaaaattcagcttaactgatgattctaatcatagtgggtggtattataaggctctctgtggttagtacttggaatactcggcagtggttgactttttgttgaaaacacgatctatctcttaagaaacaaaggtaggggaaagcaaattaaacccataagatgggtaccattttacaccttcaggattggcaaaaaagaaattggaccataaccatgttacattaagatgtgaaacaacaggaactcagtgaatctggaaaacagtttattaaattattttaatggaaagtgaaagctgtctgagagcagggtgatgtagagccttacctggtttgatcactttgccattggtgcgggacctgggcactgactgcctgtcaggaacaggcattggaagcatttttaatggccacctccaggttgcagggcagcagaggagagagggtagagagttctgcaagctgctgacccatgcttctgttttaccattatttatttgatgttcttaaagattagttaggaacagagcaggccatggagcttgatggtgagagaccagagtagagacaaagaatgggagccatgggacctgatccttcacacagaggggcaaattctggagccagaaagatagacaaagcaggcaagcatgcacctttgaaatagcgtttggtgtaaaatgaaggttgagttccccaaatctgatgatccaatattagccaaaagcagtaagatggacattcaggaagtaagaagctaacctccaggagtaaggaggcaccagtcaggagtagttagatgtttttatcagacaaagcaagttttaaaagaaaaaactaaatacttatttattcaacacatttatcgcacatacattaggtgctggcacatacattaggtacaggtatattcctgtggcttgcataaatcctcatgggtctgtttagtcatcatggtctgcaattaggggacgtgatcacttaacaacactcactgtttcttccagaggttatgagtcagacatgaactgggagaaaggcgaaggccagcccttcgaatactttgtttatggagctgcctgttccgaggttgaaatagactgcctgacgggggatcataaggtcagtaccggttggaaaggtcttcaagttgcacttaggatgcacctaaattccacagatgccatctatctgaggagagcttagtgagtggcagcatcgtgcatttggcctaagggtgatttccctggattaccagaagaaaatagaatccccacaattgccttggtgatctggttgctgccatggaaaacaactggtggcctgtctttatttccctggcccttttaaatggaatcaggaaagaaactacatgaagaaagaaacatgctctaaagggggctttcatgtagactattggcacaaccagcaattctgactttttatgagaaatgccaagatatgacattcttgaaggatttcatagacatctgtaatctgctaacaagcaccaagccagcccagggcaggtagtggccacttttttatatcttttactcagctaggtcttgccttttagaagtccagtgtgctatccattgtgccacagagctggcttggtcttgctttttagatagtttaagagcatccttatgctttcaagggatgctctgaagagatacacacacatacacacaaacacacacacacacacacacacacacactctctctctctctctctctctctccccctctttctgtctctgttgcttcaaagactcatagaatttctcctcttgtaccagagccttcgggagtaaaagaagccacttactggtcactgtcaatactaataaatgatcactgatacattaaatgggactgtgataccctaacaactgtcatgtgaccaagctaccagtttagtgataatctcttccaaaatgtacctagaagcaagctctagttcttgatatttacaaatatcctctatgcctgtgttcttggattgtgatcagatttaaattttcatttaataagtctccagcatgtattttttaaaactatagtcaacctaatctctgaaactatggtcacttttattgaacctgccttttcaagtatctaacctgtctggttctaattcagactggatctctatagggtaacctcgcactagggcaaaacagtgatcactttgagcatggtttttgtgttagactagcagccctacactactagggagcgggttcttgcatagaactgatttctgtttgtttgtttgtttgtttttgagacagaatttcactctgtcacccaggctggagtacagtggcttgatcttggcttactgcaatctctgcctcctgggtttaagtgattcttgtgcctcagcctcccaagtagctgggattacaggctgcgccaccacacccagctaatttttgtatttttagtacagacatggcttcaccatgttgcccaggctggtctcaaactcctggccttcaagtgatccacccaccttggccttccaaagtgctgggattataggcctgagccactgtgccctgcccatataactgatttctaagtcccttctccctcaaagcaaaagttggtgaaaacttagtcatgtggattttcttatattcctatatatgcattgtccttgttaagatccaagaacaaggtaataattagcctagtatgaaattttaaggcatgttcctataacttatttgaatgatcttaggggatgtgtcatatagcctcatcagatgccttcataaaagctaaatctcagctcaggttagtgtcactgctaggcaaagggccagaatgtgacattctaccaggggccctccccaaaggcctgtttctcagccattctcctgttgatagacttgcccttattccggcaaaattttcctcactttgaacctacatctaaatatcagttacctgttctgtacaacaaattacccccaaacttagtgctgaaaacagtggatgctcattagctcacaccacttctgaggggctggcctccgggagtggcttatctgggtgattctgcatgaggcttgtcaagctgtggctggggcaacagtcatctcaaggctcaacggggacaggagaatcctgttccatctccctccatcatagcgttgttgacaggaggctcagcttctcactggctgttggccagaggcctccattctttgtcatgtggatacctctttgtaggctgcctgagtgtcctcaggacaagacaactggcttcctccagagagaccagcccaagagaaaaagagagagcatgtgcaagcgagagagtacccgagacagaagcccagctttataacctaatctcagagtgactactgtcacctctgccatagcctactggtcaaacaggctggcctggtagagtataggaggagactacatatggatgtgaataccaggaggtgaggattatccagagccatcttttaggcagcctaccacaacctagatccactctctccagtcctaacaaaagacacgacagacagcactaagcctacagctttgtgggttgtttttttctgttttgaggtggattcttgctctgttgcccaggctggagtgcagtggcatgatctcagttcactgcagcctctgcctcctgggttcaagtgattctcgtgcctcagcctcctgagtagctgggactacaggcacgtgccatcacccctggctaatttttgtatttttagtagagacggcatttcaccatgttggccaagctggtctcaaactcctggcctcaagtgatctgcccccctcggcctcccaaagtgctgggattacaggcataagccagccccaccagcctaagcacacagctttgaaagcacaaccttcactaacactgaagactttagagctcctcctctaaccttcagctgaggccacttatctcctggaaggccagtcttgctgactgatgtcaaagaggactttacattttactgtgtgtttaaataagaaatgtgagttcctgaagttttattattgtcaaacattccagatcattatctaattttcaaatgttacatgaaagtcccagatcaaataaggaaactcttggatttcttttgttcaattagtaattataagaacaatctgttagtcatggcagagaccattatatcacattaaaaaaaatgtacagacttgctggaaagcaaaggtgttactaacactctggctgggcctgctgtacttctcctcatttgtaggttatcagtagcaagttgtagtgtcaactttattctcttctctgctacaaaaatgaaaagtctagaacagcagatgacaatttgaagacttttttgttggtgcaccctgaactctgtggttcagtaaacattcctcagccagttgtacctggatgtttggttgtatgctagccattaagctttgcaactaggatcgtgagggccatagatgttttcttttgttgtgtcatatgttatatctgttgtagtgaattaaactcaatctgttgcatcatacagcttgaatcaaaatgaagtaaatatttttttctcctattatttccaagaaaaaaagacagtgcttcagctggctaagagtatttgtataattttgaaagttttacataataaactttgtcctataataaaatctttgttgcttctttcgaaatgacatggctgaaagaaaggctttataccaaagtcagcctggcaggaagtgttcctcagcttcttctccctaagttattctcattaaaataaacattttaacttttttttaatactagaacatcagaacagacattgtcatggatgttggctgcagtataaatccagccattgacataggccaggtacgtgtaactgatgtgtctcactttctatttgtaaaagccaaaagtgcggtggggtctgcaggagagcattccatcagtcttattcatcatcttatttttctaaccctttagtcaactctattcagaccaactgcagagctcaaatgttttactgtttaaaagggggaaggaaataaaggtgttttaggtagtttttgaagaaacataaaatctgtgactagggagcttgaatgaggcaagaccaagcctacaggtgactgatgagctccaaacttctgggacataaatagagttagtgcccagtgctgagccttagccacacgatgggcttcagcttcgaggagtttgaagtcgtgttgggataacaagcctcaagtcatcagagcagtagctgttggtaggcagcctgtagtgctggattccacccacagacattttcaaatttaaatttgaaatagttgaaaagattggaaagtcataaatatctagtttctcttgaaaacagaaagtttgcccacactggatcctcatttccatgagtgaagtcggtgggctgtacctttagagtcccacactctccaatgacacaggacccacctggaatcttcatatactgggtttgcgtgtctcgaacctggaggcaattcagctcattacctctgatttagggcaccatcttgtgtcccctcccccccaccccccgcccccaccatcatgacattgcattattggcgaatgggaagaatctgtggtgtggagaagtcaaaggaggcttagggaggaagtgggtgtgaaccaggttgtcaaggaaagaatgagaaacgacattaggggtgaaagaagagtggaggaagtcaccctacagaaacacatggaatttagcatgcctgttcatggctgctaatcaggccagggcagatgactatggggaaggcctgtgtgggaggggtgggccatgaggagggagtcagagagcagaagagggctggggactgccaggggtgggtggagggcttttagagacaagacttcacttagtggggatggactgaagtgtttggaagactgatctaaaatcagagtccagagatgtgaggctagccactttgtgggcaaggaggtgggatgagacaatgggattgtagcattcactagcaccctggggtctctggacacatcagtcaggggggtttgtctgcctcatgggcaaaaaacaaaagaagagggtgcttgggctccagactctgtgaagactcttcctgagcactcatttcaatggccaaaccaaaattagaaccctagtcctttgtctttgaccttctttttttcatgatttttatttattattattattattttttttttttgagactaagttttgctcttgttgcccgggctggagtgcaatggtgcaatctcagctcaccgcaacctccgcctcccaggttcaagcgattctcctgcctcagcctcccgagtagctggaattataggcatgcaccatcacacccagctaattttttttgtatttttagtagagacgggatttctctatgttagtcaggctggtctcaaactcccaacctcaggtgatccgcctgcctcggcctcccaaagtgctgggattacaggtgtgagccaccacgcccggctgactttgaacttcttttaacttaatgctgaacaaacatgtttaaaatggcttttagataaactttcagcaacatgctccaagacaccctgaaaatgctcttaaactgtaattttaaaattcaagcaaacagcatgaagttgaaatgctacttagtgttgactgtgttttctcatacgtggaaattctttttttgttcttgcctcagattgaaggtgcatttattcaaggcatgggactttatacaatagaggaactgaattattctccccagggcattctgcacactcgtggtccagaccaatataaaatccctgccatctgtgacatgcccacggagttgcacattgctttgttgcctccttctcaaaactcaaatactctttattcatctaaggtaagtaatgttctatgggtaaatatgcatgtttatatgatacctgttgggtgacaggaaggctacattcctctcttggctgtttgggatttttaccaggattgcagaagaaaaattcttattaaacattttaattctaatctaacattatgataaaaatttttagtattccaaatcttagaacttaacatcaactactattgccatcaggttctatctaatttttcaccttgcaataatcatcttcatgcctaataatcatcttctgtatgtaggtcatttcctgaggctagaattctaagaatgggaatattggatcaaaagattaaattactttttgaaacaaaaaatttatataggccgggcgcagtggctcatgcctataatccaagcactttgggaggccaaggcgggcagatcacctgagtccaagagttcgagaccagcctggccaacctagtgaaaccccatctctgctaaaaatacaaaaaaatagccaggtgtggcggtgcatgtctataatcccagctacttggaggctgaggcaggagaatggctcaaacctgggaggcggaggttgcagtgagctgagattgtgtcactacactccagtgtcatgcttgggcaacagagccagactctgtctcaaaaaaaaaaaaatgtacatatgtagtacgtaatatttttatatatgcacatatgctataaatatgcacatatatacagagtgagagagagaggtataatctagttggcatgcttcctttcaagggtctgggagagtcgggggtgttcctggggtgttccgtgtttttcgctatccatgacgcagtgagtgcagcacgacaggagagaggcctgcatggacccttgacccttaatagtccactgaccccggagaagattaggatggcctgtgaagacaagttcacaaaaatggtacgtttgcatggtagaaaaaaaatagtgatcataaaattctgaatttttggcctctgttcttgtggtaagttttcgtgaacgcactgctgtggcttttcttgccagaaaaggtgacgggaaacctgggggcatttgagcagatgtgcagaggggtccttgaacttgtacccctcgggttgcattttttcatcagcctgcccctgcttggctccattctatactatttgacaaaagaaagttcattcccattagttttatgttcctctcctgttttgctcccttcctaggacaccttggtcaggaatagaagttcaggaactatgccctgaacctaggacacccagtccaggaatataggcccctctgacagtctgcctccaccccaaccccaaacgggcacccggaaagtatgctagcaggaacccctcccctctggcaacagcgcccatgccgagcagacatctctaccctccttggatattttcagggacagggtttttaattgtggaagaaagtcatactgttcacagttaccaccctgactttgactgaagggaaagcccctcccatcctccactcacactggctctttgtggtatccttcatggttttccctaagcccctgacacgttgctttttctactctggagaaacagagacccactccacttttcactgggtggtcttcaagcgtgagatgataaccccaggacctctccagtcctcccctggcttcctctatacttcacaggctgttgttccctgacctgtcatggccctggttgccctctgctggtgtttaacctactttatgttcttctatttttcacctaagtcacaaacatttcccaggtttgaacatccagatttgtttttattttagattccgagagatgaacctggatcctacgttccttggaatgtacccatctgaatcaaatgcaaacttctggagaaaacagagtgcctcttcccagatggcaatctgtcctatctctgtgctggaagatgctagatctgaaagacagagtttccacagttcagaaatcatcccacagtgttgcttttctatggagctgatttaaagtattccatttagatttgatagatatgcttaagcaatctataaatcattttcaatgttataaacactaattggtttcctctagggtgatatccgtcattactctgtctcttcaatccatccagctaaatggaataggtgatgacttgcatgtgactcctacttggcttctatccaccaacagaaattataccatatagtgaaaggcaattttctaaataatttcattactaatatgaactgtgaagttgtcattttttcatttgtccttttctgctatcaccttcctcttgtcagaatgaatatagacactgtatctaagtgggaccaaagaaaaaatagcgaactttcaccaaagttttcatgaaaacccaaaagctttaaaagttactatcaagaaattgaaaggaaacccacagaataggataaaatatttgtaaatcatatatttgataaaagtcttgtaaccagatacataaagagctcttacaactcaataaaaggcaagtaatttaaaaataggcaaaagaattgctggatggtatggtagttctatttttagtttttaccctaactactctgacttgatcatttaacattctgtgtatgtaacaaaatatcacatgcataaatattatgtatcaataaaattttttaatgggcaa

SEQ ID NO: 2 - DNA, 37557 bp, Homo sapiens
  misc_feature (1)..(37557): DNA nucleotide sequence of the entire C1orf114 genomic locus including 5000-bp upstream sequence.
tatttcttcaaattatcatactacttctttctcttttctcaaggactcccacaatgcagactgtggtccatttggtggtgttctacaggtcccctaggctctcttcacttttaactttttaatttttttgtttctcagatacaacaatttcaattgtcttatctttaagttcactgattctttcttctgcctgaccaaatatgcttttgaatcccaacagtaagattttcatttcagttgtacttttcagctctagaatttctttgatttcttttttagttttcaatttattgatatttccattttgtttatatattattttcttcactttctccacatctttccttagttatttgagcatctttatgatttaaggtcttctcaggtatttttctgagtttatgcctttctctgggtgttcaatttaactttatacttttctctgtaaatgtagttgctttttaatgtcttagtctttaatgtttgtcttccaaaaggaagaaaacaaggaaaattccctggaagttgcttcagctggaggagtaaaagcttacaatggtgggggaaggtgcaacaacaatggcggctacctctgtgtttgcatctccttgatcagaagcagtaatcaattatcagaacatagaccctcatcaataggaggacagggtccttactgctcattgactctcatgaactatgttaaagctgctcctgcaagtaatacagactgcctgctagggagctggggtttggggttgggtagatgatactgaactaagagctgaaattcaccaaaataagttcagttttctgtccaagccttcccttgaaagttgcaagcctttaatagactccacagttccaaaatagttacaagagataggttttgacagtgcaattgtttttccaggtggggagatagattcctggtgcttcctattccaccatctttttagaatcctccagcagtacttcatttatttttattgcagaataatattccattgtatagatatataacatttatccattcatcatttgatggacatttgagtcatttccacttttggctaccaatcatgctgctatatcccaaccaggcaagagaaagaaataaagggcatccacattggtaaagaggaaatcaaactgttgctgtttgtcagtgacataatcatatactagaaaaccatccaaaaagattctagaactgataaattaattcagtaaagtttcaggatataaaatcaatgtacacaaatcagtagtgaggcaggagaatagggtctggagtcagtgaacctaaggccatttcacactgacttcctagaatgcagttgaaaggaaaaccctaacttgccatgtttaagtaacaaaaggaccagaggctacttccttggcaaatcctctttcctgcagatgggaaattgaaagtacccctgattggttgcaaagagcataggagtgtaatgtttgcataggagtgtaactttgtaacttcacttcaacctctgattggttgctttccacaaccaatcagactgattgcgggccaccacttcatttacatggggtgaaccaatgtaaagtgtccaatgggaaacctctagtgggtatttggacccaagaagattctgtatctggagcccttgagccactgctcatgcctgttgccacattgtggagtgtactttcattttcaataaaaatctctgcttttgttgcttcattctttccttgctttatttgtgtgtttttttttttccaattctttgttcaaaataccaagaacatggacaccctccaccggtaacagtagcactgctgtataccaacatcaaccaagatgagaatcaaatcaagaactcaaccccattacaatagctgcaaaaaataaaatacttaggaatatacctaaccaaggaggtgaaagatctctacaaggaaaactaaaaaacactgatgaaagaaatcatagatgacacaaacaaatggaagcaaatcccatgctcatagatgggtagaatcactattgtgaaaatgactatactgccaaaagcagtctacaaactcaatgcaattcccatcaaaataccattatcattcttcacagaactagaaaaaacaaccctcaaattcatataaaaccaaaaaggagcctgcagagccaaaggaaaactaagcaagaagaacaaatctggaggcattacattacccaacttcaaactatactacaaggctatagtcactaaaacatcatggtactggcataaaaacaggcacatagactaatgaaacagaatagagaaccaagaaatgaagctaactgatctctgacaaagcacacacaaatataaagtgaggaaaggacaccatattcaacaaatggtgctgggataattggcaagcaacatgtagaaaaatgaaactggatcctcatctctcaccttatacaaaaatcaactcaagatggatcaaatacttaaatctaagacctgaaaccataaaaattctagaagatagcattggaaaaacccttctagacattggcgttggcaaagacttcatgaccaagaatctaaaagcaaacgcaacaaaaacaaaggtaagtagatgggacttaattaaactaaaaagcttctgcatagcaaaagaaataatcagcagagtaaacagacaacccacagagtgggagaaaatcttcacaaactatgcatctaactaaggactaatatccacaatcttcaaggaactcaaacaaatcagcaaggaaaaaacgaataagctcatcaaaaagtgggctaaggacatgaatagacaattctcaaaataagatattcaaatggccaataaagagatgaaaaaatgctcaacatcactaatgatcagggaaatgcaaatcaaaacctcaatacgataccaccttactcctgcaagaatggtcataagcaaaaaataaaaaaaacaacagatgttggcatggatgtggtgaacagggaacacttttatactggtgatgggaatgtaaactagtacaatcactatggaaaacagtgtggagattctttaaagaactaaaagtagatctaccatttgatgcagcaatcccactaccgtgtatctacccagaggaaaagaagtcattatgtgaaaaagacacttgcacatgtttatcgcagcacaattcgcaattacaaaaataaagaaccaaaccaaatgcccatcaaccaacgagtggataaagaaaatgtggtacatatacataccatggaatactactcagtcatatgaaggaatgaaattgtggcatcgtagctacctggatggaaatggaggttatttcatcattattctaagtgaagtaactcaggaatggaaaaccaaacatcatatgttctcacttgtaagtgggagctaagctatgaggatgcaaaggcgtaaagatgatacagtggactttggggacttgggagaaagggtgggagcaggatgaggcataaaaaaactacatattggttaagaggcccaggtgggcagactgcctgagctcagttgttggagaacagcttgggcaacatggtgaaaacccatctctactaaaaatacaaaaacttagccaggtgtggtggcgtgcctgtagtttcagctactctgggggctaaggcacaagaatcgcttgaacccgggagatggaggttgaagtgagcccagatcgtgccacttcactccagcctgggtgacagagcgagactctgtctcaaaaacaaaacaaacaaacaaagaaacaaacaaaaaaactctacatattgggtacagtgtacactgctcaggtgatgggtgcaccaaaatctcagaaatcaccgctaaagaacttatccatgtaaccaaacaccacctgttcccccaaaacctgatacttaaaaaaaaagctgctatcacccattatttgaaaaatacaaatttaggaggatggtcagaggaaaaaactattaacctaggagttctgaaacctagggtctacttccagctttggtaagtaactctacaactctacatccattaaaggagatttgactaaaattccttcaacctttagcagtgaataaccttttttgggagcgtcttttttcaagcgctgaagcagtagcaacattaggtcattacaactacaccacatctaggaagtgcactcaatattacaattcattttaaccttccattttaaaagaccttaagtctataacttgaagaatatctaaaaatttaattttacattgcctctcttggagaaaaggtgctctccatcacatcaagtgatagaaatcctaataataaacaatttaaaaataatccgaacacactggattgtactgaggaaatatttttacttctcccagttcttatttatttctggctgggaatggatagttgttaaaatcatctcaactttcaccacaatctaaattcatcttgctttgcctttatacataaagataagcagaatttgagaaaattctagttgaccattttgacatgcctcaaagctagagcaaaaatcctattttctttggcaactctcttgggtaaagttttggttttgattaggaaaaaaagaagctgagggtcaaaaatatggtaactcattagcaatttgcttatctactaatgaaaactaaaaactacttttctacgttaactgtgaagcacataacatatagaaatatagttttagaagttgtcctaagaaattctaaatctgacgagagacagctacaagagggaaatttcacaaccaacacagcggcacttcgcgagtctctataacgttagtgatgcgtggattccttagtcgtccccttagaaacctcagcttcactggcccttcgcaagcaccgggatgggtgccgggaggggtcggtggtctgaggatattgcatgcgcctgcgcagatttttgtcgctctcgtagttagagaggcccggatggaggacgcagaggcacgctgttgccatggcagtgtggtcctggctgccgcggaggcaggtgccggggtctcctttgcctcaatgtgaagagcttagaaagaggaggagaggagaactcccccggccatctctgtgatcccagccgccgcattttacacaggcaagagggatatagagggagagaagggaaggacgatgcggagatgttaatggtgggatagagggtaaaggtataaacgtctggtatagctgggagggagggtaggtagtgagggaagaagctttctggtggcgccttatcctctggagtccgaggtccaccgagtctggcactggtggggaagtctggtaacacctttcttcactatgtatgaaggatactcgtctgagagtagcttagactaaatttttgtcatattctttcccctctcaaagttcttgaacgtggaaagtaataattttgtccctgggagaaaaagtcactcccgaaattgtagcttccatgaggaggcaatggtattcatttcgttggtggtaccttgggatcctgaatacagattaaaattatcacctaaagtccataaaatatttatcatcatactttgtgacagtttatgattttttaaaaacttacttataggatcacagtcttggcaggatacacaggaataatgggccagatggtttcatgatgtatggattagtttttgcttaagtacttactttatattaaaaggcattctctttgacatgctttcagttcttagatttttaagcaagcatatgtttaaaacgctgtaagatgggacccaattatttaaactatttttgaatatcctgaattctggaagaaagttatcaaaattatgtatacatgtggacttggtttaagactcctactgaaagatcggcagttcacctatccacatgggatttaccagacactcagggaggaaggaatttatttccgtctcttactacagttccgtattaagagggtagagctggtctaagccgtttacctagatttttactgatgataaatgttgaaatttaaatgtgtgaaactcacaagcataaagtaggaagtgttaagtgattttgtttgtataagatgtatttttgttctagcttgttgattctgtaccatatggacagtaccctggtgatgaagattaaaagaattgaaggggttgaatatcctgtgacgcatttgaaaaaggcttaagggatttgataaccagagtttgtaatttatgttctttgtttacttgagaaccggccatgagggtgtttttttgtttttaagttacaacaaaagaattgcacttcagatttgatgtgacttaatttacttctcagagttaccttaactatggcttttttttcctttgaattatggcataatagtatgacttaaagacccctaacctgttaaatttttaattactgtgcttttattatacagattttatgttttcattttaaattttagttttcatgtgtgtgtgattctctgtaaacaataaaacatatctactaaagtcttcaggcaaccatttatttataagttcagaactatgtttatcataaaataagggaaagcactgaagagttccaaagaaatattcttataatatttatgtaactcaaacatcttaaaataataaatttcaagatccctgctctgaaaagaaaactgattattccaaggcattgtgactgtgaaaagtactatttttactgtaagtatttcggattacagtgagttttattctgtatcattcatggtgcccttgcttttaattggtaggtagttagatataatagcttaagcaatttagcttgtcttgcagttaggaagtgaaactcactctgaagtgttgacttgatttctccagatcacttcaaaatttgtgctcaacctgatttagaaattattgaagggcttacttttgagtcctttagcaaatctattttgtgtttttagtttaaaataaataagtatctagaaagaattatagtccaatgaatagtttagaaaaaaacaataattatccagttgaacaattaacagttatttttgaataataattaagttgaataacagttattattcagtaataacttagtctggccaaaggtttggggagaacaaagcgaagctaatggctaaaacagctggtggattatttattaattcagcatacctaaagtgtaccaaaaattaactttatcttgagagggaaaaggaaccaacatcaataactatttggggaacagggggaaggtgggagagtttttaggaatgtttacctatggaaatgtcttgccattgcagatctctctttcatggtgtattcaagtgcatgttcattttgaacattctattttgtgtttctctgtgttaattagcttacctacagcattaatctccatactccattcctcctctagagtgggcataacatataccttatcttttaaaatcttacagcatatttccttcacaaacagaaaatgaatgaaaataaagatactgattcaaagaaaagtgaagaatacgaagatgactttgaaaaggacctggagtggttaattaatgaaaatgaaaaaagtgatgccagcataatagaggtatatattgccaacagcattcataataattatattacaaagtgctttgcaattctttaaggttttcacattattatctcatctaaacatcacaaaatttctttgatctacattgggcaaattactattatcctcatcttaaagataagaaaaatgaggcgtagattgcttaaatgttgtatcctaaggcatagggcaggttagtgagagaacagttattacgctagcatttaataaactaaagtgaccattataaaattataatttaaataatataaataaatagtaaaatcatgatttattgcatcgaaagtaaaaaatacagttaattcctactttctgtgaacttgggtaaaatcatggggttatgctattaaaataaatgaaaaataaagcaaatcctctaaacacatgaccttttagctaatatttaaaactttaagactgaattagctcttcttggcaatgaatatagagaacaaagtaaagggtcaaagtctgagtcacaggaatactcctaggaaaagtggatgcattaagcatggtcatatactatttatcagagatgaagaaaggaactccaggaaaattaaccagttcctgcatcaaggtaggttatttctctctctctttacatgtgtataatgtgtatatgtatttctgtaaaacatatatatgtatatatgcatatgtatgtgtgtatatatatgtatatacataagttagtgtcaataagtagaaaaaggaataacactaggatataaataggtgactttggagggataatgatcagagttatagcagaagccagttttaaaggtgttaaggaaaagactatgaggaaatgcaggttttatattacagatttcttagttccattttgctttcttatataatggaaaagacaaatggaatacacaatgtttgaagatggaaacagagtcaaaagtgaagatttttctaagatggcttttaaatgggagttttatgcatcctaacagaaaaataagcagaatgagtagaggcagatacccagagtggtaaggttgaaccaatttctcaagactggaagggtgtgagatccaaagcacagtgcgatagaattagagaggtaatagggatgatttattgttttattttctaattcaacaagtattaatgatcacctatcatatcagaggctgttctaggtgctagggatatatatagcaggaataaaataaaagtgctgttatgaatcttacacattccagcggatgattataacaacctcttcttttgaggcttttgggaaaaggggatgactgagctagagacacataagagggtcaggggaagatttttttgtaaaaagtgggttttcaaaagaaaagaaaagaaaagctaaaggagagttcagaaacagagactataagaatgaaccagagatctgccatcctcatgatattggaaaaataaaaaagagtcaactagagaaacaaataaggctaaaatgaacacttgtgatacagagctcttagttaaatcatagttatttggcagtcatttaaatgggccaggtttatttgcttattagacatctgactatcagacaagatgaccttcactatcacacaggatgacctatgagcaaatgaaggaggaaagtgattttaaggggttgaagagagaagcatgtagtagctcccatagaactgctttaggagggagagaactttgacaaagagaaaaaatatatatatatataaaatatttatatacatttatatattatatctattatatttttatatatataagcttttagttagatacagcagaagtggagttttgtgctgcactgatactggtttatggttcatgtggaattaactttttttaatttaaggccaagttatctgatggtggttagcatggatttctgaaatctctgagtatagttgaagaagggaaatctgatctagaggtaaaaattgacctggaatttagataggtcctgcagattatagtgataataatagtctgaaaagattaaaagaacctcaagtgattaggacctgaccaaataattcatccttgaaatggtctggggagaaagctgtttgattgaagaatgcaaatattacaaggaggaaagatttttgaaaattgtttttctgaaaatgtaaagagaggaaaattttataggggaaggaatattaatattgttatttgtagttaccttttgatacattagcataaaaatgtttaaaaatcaatgtagcacttagctacatcaaattcaaatttaaagttgaatttttcctgcattgctgtcacattatttcccttggatactcataagtatgaattagaatgttatgagcaaattatgagcaataaacacttaaattttcccattcataaaataaattacatgaacaggaaaaatcccattttgtatgtctacttataaatgaagaatctcaattttgactgaaaaatatcttgtttttagatggcttgtgagaaggaagagaatattaaccaagacttaaaagagaatgagacagtaatggagcacaccaaacggcattctgatcctgacaaatctttgcaggatgaggtctcaccaagaagaaatgacatcatttctgtaccaggtattcaacctttggatcccatatcagattcagatagtgaaaactctttccaggaatccaaactagaaagccagaaagacttggaggaggaagaggatgaggaagtaaggagatatattatggagaaaattgtacaagctaacaagcttctacagaatcaagaaccggtgaatgataaaagggagcgaaaacttaagttcaaggaccagttagttgatttggaagttcctccactagaagacactactacttttaaaaattattttgaaaacgaaaggaatatgtttgggaaactgtcacaattatgtatttccaatgattttggacaagaagatgtgctcctgtcacttactaatggaagctgtgaagaaaacaaggataggacaatactggtagagagagatggaaaatttgaacttctgaatttacaagacattgccagtcaggggtttttgcctcccattaataatgcaaatagtacagaaaatgaccctcagcagttgttacccagatcttccaactcctctgtcagtggcaccaagaaagaagattctacagcaaagattcatgctgtcactcactcatcaacaggagagccgctggcttatatcgctcagccaccactcaaccgcaagacttgtccaagctctgctgtcaactcagatcgaagtaaagggaatgggaaatctaatcacaggacacagtctgcacatatctcaccagtgacttcaacatactgtctttcccctcgacagaaagaactacaaaaacaactagaagaaaagagagaaaaactgaaaagagaggtgagaacctaagtgggcattatattaaaagtagagtatgttttactgttttataaatgcaatgggaattaaaacagttgttcaaaccattggagactttttttgattgctttatttatctattgttagattgattaagtgttaagaatgtgcatttatggaatgaacacagtgattactttggtccttgtaaggatcacaaagaatagtagactgatctgtgttagcggagatctcagtgatgacttcatctgatcctttcattttaaaggtgagactcatgagacgttaagtgactgctgaaagtaatcttgatatgataggtaaaaataaaatgtcagatggaaaaatgaaggcataaagtgtagaggtttaggaggcaacaggaagacttggactataattcttttatttgcatgtgtttcatgttatgttctatgcttacaattcttttatttccaggagtttagtttcagattaagaatatagcctaatattcttaacgaaatgtctccaaaatgccatatagaatcccaaattaattttttttgtttttcatatttgttcttatgtgaaactctatgtatcttataattgaaaattccaggacttaaactggtgagttttctcagaattacttatgtcagtgctccaattctttgttttactggaaacctaatggtattaagctgagccatacaaaatgtctaattctaaatacaaagctcagcagataatacatgagaagtgaccttacagatcattttgcagataagaaaaccttagaaagtttaaataactttaccaaggtatatctgtacttgttagtagcaaactggaataaaaatttccagttctctggcacccttgagaaatggtgtgttatctactttatatgggaaattatcagggaaatatctggcatttaaatcaggaattggcattagcaaaaaaaaaaaaaaaaagtgaaacatgacttcgtaagaacgtgtaacctctagcacactcagataagaacctaaaagggtgcaagcttatagagcttcgttcacttggtcactaatagctctaatagtcaaactaagtttacttgattcaggtataaaaacacttgaaagtataggaatttggtgacaatacaaaataattttttgagaatgacatctatatgtttgctatacacaaatgtgtaggtatgtgtatatttttacaaaagttatacaggtgattttatatagttgtcactgcctttttattaatgaactgatgttagtctttaactggtgtgaaggatggataattctgttttcatttggattctcttttctgaatgtcacacactctttgttctgaaatacacttttattgtatcctataactaacttggctcaaggcatggtcttcaagtactaaggcttttaacatgttttagttggtttcaggggaaggctttgcttttttatgcccatattttctgggttgggctgctatactctgtctttctaacctaagtgcatcatttcagtgttctctttggcaactccgttatcagtgctttggctgatagcttctgtgtaatatacctgaatgttccccttggaaagataatcatcgtttgtcatactgtattcatgcaaggcatccaaagtcctttgtgtgaaatggaaatgtataaataatgtaaaatttaattcttaataaattcatttatatttcctataatacaggctactttagggctcagaaaatagtatataggtattctcaaatatattttatgctgtttggtagaattttcctttcctcccttccttctgttcaatcaaaaggaattagaaagtcttgctatattgtcaaaatgtaaggaaaacacttagaattccattatttgaagaaaattttactatgaacttgttaaattagcccagctaatttttgtattttgggtagagatgggttttcaccatgttggccagtctggtctcgaactcctgacctcaagtgatctgcctgcctcggccccccagagtgctgggattacaggcatgagccaccgtgtctggcctagaaggaccagttttctgatggaaagttttagggtcagggaatcctaatttcagatctcaaaatatatctctctactctgataactcatacaattttattaatcttccattaatgtcttttcatattcttttactaggaagagcgacgaaaaatagaagaagagaaagaaaaaaagagagagaatgacatagtatttaaagcgtggttgcaaaagaaaagagagcaggtcttagaaatgaggagaattcagcgagcaaaggaaattgaagacatgaacagtagagtaagtaaaacttctctgaaaaataagttcatacagatatgaaagctgaacttatttatagaagggagtctggatatcagactaacagcctatggaagaagtagaaaagttgttcaagaactacccttgcaaaagatgcaacatgcagataactacaattaggttctaagaggtcttgtgaaaataaaatgattcctattttgttcagactttgatggaacagaaaacagaaaactatcaattcgttttttcaaggtgtaactttgttattcaaacagggcaaagatacacacacacccccccacaaaaccctagagactggtctcacttaagactagacgtatagaaatattatgtaaatctttagcaaattaaagacaccaaattatttaatttaaaagaattaaaaaaactaaaacagaaaatagagaaaatttaaaaatcattcatattcttactaaaaaaagatatatatgtaaagttgaaagtataataataataaaatttaaaaaaaaagaaaaaaagaaaatttaaccctaagctcctccaggctcatctccagtgataaccacttttaacagcgtggtgcaaatccttttatatcttatttatatttatatatttacatgtcaaaagttttattcagttttttttcacttcatcatggaactctttctaagccattacatttaaatctctctttttcaaatagctgcatggtattacagtgttaatttattaagccattcttcatttgtagatatttaggttggttccaatgttgcgttagttaacagtgctgtagtgaagaggtacattctatgggaacatcagtaatctgtaggagaagttcttcagaggtgaatttaaaatgtttgaaggcttagagtgaaatgtttcgttaaagatgcaaaagtaacctcccaaaagataatatgaatttatagttcctccaacagtgtgtgagagtaaatgttatacctgttcctccaacggtgtgtgagagtgaatgactaacactgtatgtgggttatcatcttatttttccttcaaattaataatatacatgcttgtatatgagcatgtgtgagaaataataagagatagatataggtctctacccctagtttttggcacacagctcctaaaacctttttaatttcttgagtgatgggggttctacatgtatctcttgttctaataactgagcttttatcctggcttctgacaaacagctgctaattccttggaacttcttaggtgataggactctctttgttctaataagatgactcttggtgggctcctggttaggtgctggctgccagaaagactaagccatgattagaagcccggaactttcagttctaactcctttcttctaggaagggggaaggggctagagattgagttaataatctcaataactatgtgatgaagcctttataaaaatccccaagctgcagggttcagagagcttctagggtatgggaaatgtggtgttgggggggtggtgtgcccccaagagggcatggaagcttcacaccccttcccaaatactttgccttgtgtagctcttcatctgtgtcttttattatattctttattaataaacttgtaaatgtgtttcctcgagttatgtgagttgctctagcaaattaatcaaacctgaggagagggtcatgttcccaccactccccaccctggcaatatatagctggtcagacagaagctctggtcacaatctaggcttttgattgatatctgaagtggaggcaatcttgagggattgagcccttaacccatgggatttgatgctaactccagggatatattatcagaatcggattaaattgtaggatacccagctggtgttaaacttgtcagtgtgggaagtgggaacccttccccattttggtaaccagaggtgaagtattctgtgttgagtgtgaatgagaaggaaaaccaattggtttttctatttatatagcgtgtgtattattctgtgaatttcctgtttataatctttttccttttttagtttggtttttattatctaagtggtatatgagagattttgatcctttgtctattatatatgttatatattttcctagtctgacaatatattttttgttacagtgtttattatgccatttgtggaagtttttagctttttaaaatcttgggatgggcagtactttcacaggcaaggcagaaaaaacataaactaaaagaggaaatatggagaaatttgactgataccatatagtaaaataataatacactgagtaagatttaggaaggaaattatggatcagtaataacatgtactaatatcattcatcacatcagtaagtagataaaagaatattatcttgaaagatatagcaaaggtataatttctttttaaaaattcctaataaaatgcggataataaacactataatggggaaatactctaggcatacctgttacaatcagaaacatgtaaggttctatattaaataactgtattctggtgtttcaatccaattcattaagaaaaggaaatgaggtaaaaataataggagtgacggggccaagatggctgactagaagcaggggggctcagaggctcctatcggaaaaaaacataataagcatgtgaatccttcactggcaaccaaggtatccaggttctctcatcaaacttgactagaaggctggcgtgacccatggacagaaggaagagcagtgtagtgcgtggcccacctgagagctacatgggaaaggagaaccccctacccccagcaaagggaggcagtgaatgagcacgctacccagaaggggaaactgtgctttttccacagaactgtgcaacccatggatcagaagatcccactagaaaatctaggccactggggcctagcgtcccaaccctagaacacgattcttacagcttctcagctggaatctacttaagcctactgaaaactcctcgtgggaggggtgaccaatttaagttgttgagtttcaggtatgcacaaaatatccagatgaagatattgaagattagttggagaaatttatccggttttcaggagaaaagttgggactggagataggaaattagcgatttcagaggtggagtagtttgtgtgatgaggatatggccatagaaatacgtggcaagtgtaatggagaaagacgtagaagatgagagaatcaaaggtctttgggggtggatgttcaatggctcttctatgtagttaaaaatataccttgggactggcatggagaggaatattgagtcaggagtgatcagaggtggttacataactatttttaatagagccaaatgatacaaatgtcaaaggaggatgggttttctcaggaaaacagaaatacaattcagaagacgtatgggggaatgaagagaatattaatttatttgtctgaccaccgaagtacttgaagtatggtagaaaatgcagcctctgtttcagagaagatgtggcttgggggagaatcagaatttgcataagataggaaatttagggccagatccctttcagtgacttgggaggatggatgttgtttgggagtttttatatcattgagtaggaattacagagaactaacaagggttatgaaggacaggaggaatttgggattgggtgaagaagcagcacagcatattgctgtagtgattacaggtatagaagacaagaggagtttatgtttcagtcagtgaccacggaaaacacagctatggccatactgctgatagcttcttggacgatgatgggccttcaggcctcatggcattccaagtattataattttttaaatggggtatttgcaaaaataaatgtacagtatattgtgcaatatttgcacataattgtgctgtatttgtacatagtaaatagtaatcttggattgtattctcagaaaacatgagtcatattgaacataatttatttcaaaaaattttatgtagaagacatcatggttatatatttccctttgaatatttattttgaatatgtagtattttttgctacatttcaagtttgtctcaaaaatatattttaatgagaaatagtatcacaaactaatagtattctgaagtacttttatgagctttgtctctactcaagctgaaatatagcacaatttggtagttgattaatttggcttattaatacattgctataataagtgcattatgttgattatttctgtgggacattgtgtataatgtgagtcatagtttccagaaaatatctttagatttatagattgtggaatgaccttttttacattagatggataaaagatcttaggtgatgtaatttttattgccatttttaggaaaaatagctaaaaatgtctttccaacgttgttttgaaatttgcttctcttgctcagtgatatatatgtatacacacacatgaaaatgtatgtatgtatatagtctatctatgttaaccgtccatgggtacttgtataccttgtgtattctgcattggatgtagtgctgtattaatgtcaatatagtctagttggttgatagtgttgttaagatcttctgcatgcttattgtcttcccccatttttcctatgaattacttagaaaatagtgttaataatttcatctatcattgtgcccttgcctatttctcctttggttctgttgagttttgcttcatgtattttcaagtgttgtgggtatacatttaggactttatgtcttcctgataatgaccttttcccattatgaaatgtccctcatatcctgaagtctgttttggctgaggttaatgtagccacatcagtgttgttatgcttaccatttgcatggtataacttttttcatattttactttcaatgtatctgtggctttatatttaaaatggcttgtgcagacgtcatatatttgaatcttccagtccagcagtccactccttatacttagtattcacttgtatttaattattttttttaattatattttaagttctgggatacgtgtgcagaaagtgcaggtttgttacataagtagacacgtgccatggtgatttgctgtacccatcaacccgtcatctacattaggtatttctcctaatgctatccctcccctagccccccaccctccgacaggccccagtgtgtgatgttcccctccctgtgtccatgtgttctcattgttcaacttccacttatgagtgagaacatgcagtgtttggttttctattcctgtgttagtttgttgagaatgatggcttccagcttcattgatgtccctgcaaaggacatgaactcatccttttttatagctgcatactattccatggtatataactgccacattttctttctccagtctgtcatttatgggcatttgggttggtttcaagtatttgttattgtgaatagtgcctcaataaacatacatgtgcatgtgtctttatagtagaataatttataatccttcgggtatataatccagtaatgggattgctgggtcaaatggtatttctggttctagagccttgaggaatcaccacactgtcttccacagtggttgaactaatttacactcccaccaacactgtaaaagaattcctatttctccacatcctctccagcatctattgtttcctgactttttaatgatcgccattctaactggtgggagatggtatctcattgtggttttgatttgcatttctctaataccagtgatgatgacctttctttcatatgtctattggctgcataaatgtcttcttagagaattgtctgttcatatcctttgcccactttttgatggggttgtttgttttttgttgtaaatttaagttccttgtagattctggatattagccctttgtctagtggatagattgcaaaaattttctcccattctgtaggtcgcctgttcactctgatgatagtttcttttgctgtgcagaagctctttagtttaattagatcccatttgtcaatgttggcttttgttgccattgctgttggtgttttagtcataaagtctttgcccatgcctgtgtcctgaatggtattgcctaggttttcttctagggtttttatggttttaggtcttctgtttaaatctttaatccatcttgagttaatttttgtataagatgtaaggaaggggtacagtttcagttttctgcatatggctagccagttttcccagcaccatttattaaataaggaatcctttccccatttcttgtttttgtcaggtttgtcgaagatcaggtggttgtagatgggtggcattatttctgagtcctctgttctgttccactggtctatatatctgttttggtaccagtaccatgctgtttgggttactgtacccttgtagtatagtttgaagtcaggtccatgatgcctccagctttgttctttttgctttagattatcttggctatgcaggctctttttttgttccatatgaactttaaagaagttttttctaattctgtgaagaacgtcaatggtagcttgatggggatagcattgaatcagtaaattactttgggcagtatggccattttcataatattgattcttcctgtccatgagcatggaatgtttttccatttgtttgtgtcatctcttatttccttgagtggtggtttgtaggtctccttgaagaggtccttcacatcccttgtaagttgtattgctaggtattttattctctttgtagcaatgtgaatgggaattcactcatgatttggctctgtttgtactactgctgtatcgtaatgcttgttatttttgcacgttgattttgtatcctgagactttgctgaagttgcttatcagcttaaggagattttgggctaagatgatggggttttctaaacatacaataatatcatctgcaaacagagacaatttgacttcctctcttcctacttgaataccctgtatttctttctcttgcctgattgccctggccagaacttccaatactatgttgaataggagtggtgagagagggcatccttgtcttatgccagttttcaaagggaatgcttccagcttttgcccattcagtatgatattggctatggatttgtcataaatagctcttattattttgagatacgtgccatcagtacctagtttattgagagtttttagcatgaagtgctgttgaattttatcgaaggccttttctgcaactattgagataattgtgtggtttttgtcattgtttctgtttatatgatggattatgtttatcgatttgcatatgttgaaccagccttgcatcccagggatgaagttgacttgatgttgaactttttcatgtgctgctggatttggtttgctggtattttattgcgaattttcacattgatgttcatcagggatattggcttgaaattttcttttcttgtgtctctgccaggctttggtatcaggatgatgctggcctcataaaataagttaggtaggagtccctctttttctgttgtttggaatagtttcagaagtaatggtaccagctcctctttgtactgctgatagaattcagctgtgaatctgtctggtccttggctttttttggttggtaggctattaattactgcctcaatttcagaacttgttattggtctatacagagatttgacttatttctggtttagtcttgggagggtgtatgtgtccaggaatttatccatttcttctagactttctagtttatttgcataaaggtgtttatactattatatgatggtagtttctatttctgtgaaatcagtggtgatatcccctttatcatttttttattgtgtctatttgattcttctctcttttattctttattagtctggatagcggtctatgtattttgttaatcttttcaaaaaaccagctcctggattgattttttgaagggtttttcatttgtctatctccttcatttctgctctgatcttagttatttcttgctttctgctagcttttgaatgtgtttgctcttgcttctctagttcttttaattgcgatgttaaaatgttgattttagatgtttcccgctttctcctgtgggcatttagtgctgtaaatttctctttaaacactgctttagctgtatcctagagatctggtacattgtgtctttgttctcattggtttcaaagaacttatttatttctcccttaatttcgttatttacccagtagtcattcaggagcaggttgttcagtttccatgtagttgtgcagttttgagtgagtttcttaatcctgagttctaatttgattgcactgtggtctgagagactgtttgttatgatttgcattcttttgcatttgctgaggagtgttttacttcccatatgtggtcaattttagaataagtgcaatgtgatgctgagaagaatgtatattttattgatttaaggtggagagttctatagatgtctattaggtccgcttggtccagagctgagttcaagtcctgaatatccttgttaattttctgtcttgtcgatctgtctaatattgacagcagggtgttaaagtctcccactattattgtgtgggtgtctaagtctctttataggtctctaagggcttgctttatgcatctgggtgctcctgtattgggtgcatatatatttaggatagttagctcttcttgttgcattgatccctttacgattatgtaatgcccttctttgtcttttttgatctttgttggtttaaagtatgttttatcagagactagtattgcaacccctgcttttttttttttttttgctttccatttgcttggtaaatgttcctccatccctttattttgagcctatgtgtgtctctgcatatgagatgtgtctcctgaatacagcacacctatgggtcttgactctatccgatttgccagtctgtgtctcttaattggggcatttatcccgtttacagtaaaggtcaatattgttatgtgtgaatttgatcctgtcattatgatgctagttggttattttgcctgttagttgatgcagtttcttcatagtgtcaatggtctttacaattggcatgtttcggcagtggttggtatctgtttttcctttacatatttagtccttccttcaggagctcttgtaaggcaggcctggtggtgacaaaatctctcagcatttgcttgtctgtaaaggattttatttctccttcacttatgaagcttagtttggctggatatgaaattctgggttgaaaattctttaagaatgttgaatattgggcccctactctcttctggcttgtagggtttctgcagagagatctgctcttagtctgatgagcttccctttataagtaacccgacctttctctctggctgcccttaacatttttttcttcatttcaaacttggtgaatctggcgattatgtgtcttggtgttgttcttcttgaggagtatctttgtggtgttctctgtatttcctaaatttgaatgtttgcctgccttggtaggttggggaagttctcctgggtaatatcctgaagagtgttttccaacttggttccattctctctgtcactttcaggtacaccaatcaaacgtaggtttggtcttttcacatagttccatatttcttggaggccaagtttgttccttttcattcttttttctctgatcttgtcttcacactttatttcattatgttgatcttcaatctctgatatcctttcttccacttcattgatttggctattgatagttgtgtatgtttcacgaagttctcatgctgtgtttttcagctccatcaggtcatttatgttcttctctgaactggttattctagttagcaactcatctaaccttttttgaagattcttagcttccttgcattgtgttagaacatgctcctttagctcagaggagtttgttattacccaccttctgaagcctacttccgtcaattcgtcaaactcattctctgtccagttttgttcccttgctggcgaggagttgtgatcctttggaggagaagaggcattctggtttttggaattttcagcctttttgcgcagggctttcctcatctttatggatttatctaccttttgtctttgatgttggtgacctttggatggggtttttgtgtggatatcctttttgttgatgttgatgctattcctttctgtttgttagttttccttctaacagtcaggcccctctgcttcaactctgctggagtttgctggaggtcctctccagaccttgtttgcttgggtatcaccagcagaagctgcagaacagcaaagattgcttcctgttccttcctctggaagctttgtcccagaggggcactctccagagctctcctgtgtgaggtgtctctcgacccctgctgggaggtgtctcccagtcaggaggcgcgggggttagggacccactggaggaggcagtctgtcccttagcagagctcaagcactgtgctgggaaatccgctgctctcttcagagctggcaggcagggacattgaagtctgctgaagctgtgcccgcagccaccccttcccccaggtgctctgtcccagggtgatgggagttttatctataagcccctgactggggctgctgcctttctttcagagatgccctgcccagagaggagtaatctagagaggcagtctggctttgccgagatgtggtgggctctgcccagttccaacttcctggctgtgaggggaaaactgcctactcaagcctcagtaatggtggacaccccttcccacaagaagctcgagcgtcccaggtcgacttcagactgctgtgctggcagtgagaatttcaagcaagtggatcttagcttgctgggctttgtgggggtgagatctgctgagctagatcacttggctccctggctttagccccctttccaggggagtgaatggttctctctcactggcattccagtatgatgaaaaactcctgcagctagcttggtgtcttcccaaacggccacccagttttgtgcttgaaacccagggccctggtggtgtaggcattcaagggaatctcctggtctcctggttgtgaagaccctgggaaaggggtggtatttgggcaataatgcacagttcctcgtagcacagtccctcacagcttcccttggctaggggagggagttccctgaccccttgagcttcccaggtgaggcgacgcttcaccctgcctcggctcaccctctgtgggttgcacccactgtctaaccagtcctagtgagatgagccgagtgcctcagttacaaacgcagaaatcacctgccttctgtgttggtctcactgggagctgcagattggagctgttcctatttggccatcttgccagccacccctgtatttaattataattattgatcgatagtttttaaatctgtcatcttgatatttgttatctatttgttcaattactcatccttttctgccttataatcaagtatttaaaaaacagtcctttttattttcttatatactttttaagtatgcctctgcatgctttttttaaggcattgctctgaatatatacatatatactgaatgtgtggaaaatcaccgaagaatttttttttccttttacttggtatagaatttgaggctgacaggtatttttcccctgcagcattttaaagatgatgttcaattgttttacaatgtcctttgtttctattcagaggttggctatcattcttatcattgttctggtgtatataataaatctttttcctctggcttctttaaaattttcctggctttggtttttagaagtgtattacatgtgtgattttctttgaatttacctaacctgggttttgctgagcttcttgaatctttatgttcatgttttgtaccagatttgggaaattctcagccactgtttcttcaaaggctttttttttttttttttctgcctcatcttttttctcctctccttctggaaatccaattttacgtatgttagaagacttgctattatctcatgttactaaacgtctgtttactgaaaatttttttcatttgttcagtttacatcatttctattgatccatcttgaggcatcagtacttctgcaatgttcattccactgttaagcccattcagggaatttaggttgtgtttgtttgttggtttatttttttttattttttttgtggtgggttttttttcttttcttttttattatgctttaagttctagggtacatgtgccacaacgtgcaggtttgttacatatgtatacatgtgccatgttggtgtgctgcacccgttaactcatcctttacattaggtatatcgcttaatgctctctctccaccccacaacaggccctggtgtgtgatgttccccaccctgtgtctaagtgttctcattgttcaatgcccacctgtgagtgagaacatgcggtgtttggttttctgtccttgtgatagtttgctcagaatgatggtctccagcttcatccatgtccctaaaaaggatatgaactcatccttttttatggctgcatagtattccatggtgtatatgtgcaacatttacttaatccagtctatcattgttggacgtttgggttggttccgagtctttgctattgtgaatagtgctgcaataaacatatgtgtgcatgtgtctttatagcagcatgatttataatcctttgggtatatacccagtaatgggatggctgggtcaaatggtatttctagttctagatacttgaggaattgccacactgtcttccacagtggttgaactactttacactcccaccaacactgtaaaagagttcctatttctccacatcctctccagcacctgttgtgtcctgactttttaatgattgccattctaactggtgtgagatggtatcttgttgtggttttgatttgcatttctctgatggccagtgatgatgagccttttttcatgtgtatgttggctgcataaatgtcttcttttgagaagtgtctgttcatatccttcactcattttttgatggggttgtttttttcttgtaaatttaagctctttgtaaattctggatattagccctttgtcagatgggtagattgtaaaaattttcccccattctgtaggttgcctgttcactctgatggtagtttcttttgctgtgcagaagctctttattttaattagatcccatttgtcaattttggcttttgttgccattgcttttgttttagtcatgaagtctttgcccatgcctgtggcctgaatggtatttcctagcttttcttctagggtttttatggttttaggtctaacatttaagtctttaatccatcttgaattaatttttgtataaggcgtaaggaaggaatccagtttcagctttctacatatggctagccagttttcccagcaccatttattaaatagggaatccttccgccgtttcttgtttttgtgaggtttgtcaaagatcagatggttgtagatatgtggtattatttctgagggttctgttctgttccactggtctatatctctgttttggtaccagtaccatgctgttttggttactgtatccttgcagtgtagtttgcagtcaggtagcgtgatgcctccagctttgttctttttgcttaggattgtcttggcaatgtgggctcttttttggttccatatgaactttaaagtagttttttccattctgtgaagaaagtcattgatagcttgatggggatggcattgaatctataaattaccttgggcagtatggccattttcacgatattgattcttactatctatgaacatggaatgttcttccatttgtttgtgtcctcttatttcattgagcagtggtttgtagttctccttgaagaggtccttcacatcccttgtaagttggattcctaggtattttattccctttgaagcaattatgaatgagaattcactcatgatttggctctctgtttgtctgttattggtgtataagaatgcttgtgatttttgtacattgattttgtatcctgagattttgctgaagttgcttatcagcttaaggagattttgggctgagacgatggggtttctaaatatacaatcatgtcatctgcaaacagggacaatttgacttcctcttttcctaattgaatacactttatttctttctcctgcctgattgccctgtccagaacttccaacactatgttgaataggagtggcgagagagggcatccctgtcttgtgccagttttcaaagggaatgcttccagttttgcccattcactatgatattggctgtggatttctcataaatagctctcattattttgagatacgtcccatcaatacttagttcattgagagtttttaggataaagggctgttgaattttttcgaaggccttttctgcatctattgagataatcatgtggtttttgtctttggttctgtttagatgatggattacgtttattgatttgcatacgttgaaccaggcttgcatcccagggatgaagcccacttgatcatggtggataagctttttgatgtgctgctggatttggtttgccagtattttattgaggatttttgcatcaatgttcatcaggggtattggtcaaaaattctctttttttgttgtgtctctgccaggctttggtatcaggatgatgctggccttataacgagttagggaggattccctctttttctgatgattggaatagtttcagaaggaatggtacctgctcctctttgtacctctggtagaatttggctgtgaatctgtctggtcctggactttttttggttggtaggctattaattattgcctcaatttcagagcctgttattcgtctattcagggattcagcttcttcctggtttagtcttgggagggtgtatgtgtccaggagtttatccatttcttctagattttctagtttatttgcatagaggtgtttatagtattctctgatggtagtttgtatttctgtgggatcggtggtgatatcccctttatcaatttttattgcatctatttgattcttctctcttttcttctttattagtcttggtagcagtctatcgattttgctgatcttttcaaaaaaccagctcctggattcattgatttttttgaagggtttcttttgtctctatctccttcagttctgctctgatcttagttatttcttgccttctgctagcttttgaatgtgtttgctcttgtttctccagttcttttaattgtgatgttagggtatcaattttagatctttcctgctttctcttgtgggcatttagtgctataaatttcactctacacactgctttaaatgtgtcccagagattcttgtatgttgtgtctttgttctcattggtttcaaagaacatctttatttctgccttcatttcgttatctacccagtagtcattcaggagcaggttgttcagtttccacgtagttgagcggttttgagtgagtttcttaagcctgcgttctagtttgattgcactgtggtctgagagacagtttgtaataatttctgtgtttttacatttgctgaggagtgctttactttcacctatgtggtcaattttggaataagtgtgatgtggtgctgagaagaatgtatattctgttgatttggggtggagttctgtagatgtctattaggtccgcttggtgcagagctgcgttcaattccttgatatccttgttaattttctgtctcgttgatctgtctaatgttaacagtggggtgttaaagtctcccattattaatgtgtgggagtctaagtttctctgtaggtctctaagggtttgctttatgaatctgggtgctcctgtattgggtgcatatatatttaggatagttcgctcttctcattggattgataccccatcattatataatggccttttttgtatcttttgatctttgttggtttaaagtctggttttttcagagactaggattgcaacccctgcttttttttttttttgtttgttttccatttgcttggtagatcttcctccttccctttattttgagcctatgtgtgtctctgcacatgggtatcctgaatacagcacactgatgggtcttgactctttatccaatgtgccagtctgtgtcttttaattggagcatttagcccatttacatctaaagttaatattgttatgtgtgtatttggtcctgtcattatgatgttagctggttattttgctcgttagttgatgcagtttcttcctagccttgatggtctttacattttggcatgtttttgtggtggctggtactggttgttcctttccatgtttagtgcttccttcaggagctcttttagggcaggcctggtggtgacaaaatctctcagcatttgcttgtctgtaaggtattttatttctccttcacttatgaagcttagtttggctggatatgaaattctgggttgaaaattcttttctttaagaatgttgaatattggcccccactctcttctggcttgtagagtttctgccgagagatccgctgttagtctgatgggcttccctttgtgggtaacccaacctttctctctggctgcccttaacattttttccttcatttcaactttagtaaatctgacaattatgtgtcttggagttgctcttcttgaggagtatctttgtggtatttgctgtatttcctgaatttgaatgttggcctgccttgctagcttggggaagttctcctggatcatatccagaagagtgttttctaacttggttccgttctccccgtcactttcaggtacaccaatcagacgtagatttggtcttttcacatagtcccatatttcttggaggctttgttcatttctttttacccttttttctctaaacttctcttctcacttcatttcattcatttgatcttcaatcacagataccctttcttccacttgatcaaattggctactgaaggttgtgcatgcatcgcgtagttcttgtgccatggttttcagctccatcgggtcatttaaggtctcctctacactgtttattctagttagccattcgtctaatctttttttcaaggtttttagcttctttgcgatgggttcaaacatccttctttagctcggagaagtttgttattaccgattgtctgaagccttcttctctcaactcatcaaagtcattctccatccagctttgttccattgctggggaagagctgcattcctttggagaagaggcactctgatttttagaattttcagcttttctactctggtttctccccatctttgtggtcttatctacctttggtctttgacgatggtgatgtacagatggggttttggtgtggatgtcctttctgtttgttagttttccttctaacagtcaggaccctcacctgtgggtctattggagtttgctggaggtccactccagaccctggtttgcttgggtctcaccagcagaggctgcagaacagcaaatattgcagaacagcaaatgttgctgcctgatccttcctctggaagcttcgtctcagaggggcacccggctgtatgaggtgtcagttggcccctactgggaggtgtctcccagttagcctacttgggcgtcagggacccacttgaggaggcagtctgtcctttctcagatctcaaactccgtgctgggaaaagcactactctcttcaaagctgtcagactgggacgtttaagtctgcagaagtttctgctgccttttgttcagctgtgtcttgcccccagaggtagagtctacagaggcaggcaggcctccttgagctgtggtcagctccacccagttggagcttcccagctgctttgtttacctacttaagcctcagcaatggcagacatctctcccctagccttgctgtggcattgcagtttgatctcagactgctgtgttagcagtgagtgaggctctgtgggagtgggaccctctgagccaggtgcgggatataatcttctgatgtgccgtttgctaagaccgttggaaaagtgtagtattggggtgggagtgtcccagttttccaggtaccatctgtcatagcttcccttggctaggaaagggaattccccgaccccttgtgcttcctgggtgaggcgatgccccactgtgctctgtgggctgcacccactgtctgacaagccccagtgagatgaacccggtacctcagttggaaatgcagaaatcacccgtcttctgcatcactcacgctgggagctatagactggagctgttcctatttggccatcttggatcctcctatcagtttatttttttaaatttccatttctttactgagattctctttttattcattatattcacctgttcatttcttacatattagaccttttttatattcatcttttcatttcttaaatattagacctgtttgtatctaaatgccaatatctatgtcatcttaggatcgatctgttgaaggcctctttctctggattatgggtcacattttcttgtttctttagatatccagtgattttttttaaattggttaatagactgtggatcttttcaatataaaagttgtaaggaaatatagaatacactgttttcctttaaagggtattgaatttttttcttgtaggcagttagattagtaaggaatactcttgatcctgtcagactttgttttatgctttgttaggatgggtttattttgcttttgtccttagtcctagagcatggtccttactctaggacatgacccttatttccaaagcatggcctttttagggttgtaagtggttgaccaaggtaagcaatgaagtattcccactatagttggattggaactccaatgtctccaaaactatgcaacctttattatcttcttcattaacagcagctactctctgttagaccttacagagcctcactctacacatgtgcagcccaggccttgccaagacccaagggaaacccccacacagactcttggagcatccctccacatgactgcttcatttctagtaccctgccctggaaattcagctgtctcagcagccccagactcctatctgtttcatgagcccagtgagactagtgactgcttgatgctatgactcctccttcctataccgttgtctggaaagtgtcaccaagtacagagccagggtgaatatgggggttatatcatgttttttcttactctcagttatcaagctgctgcatacattttatctagctttatagctaattagggcagaagggtaaatctgataccaattatgatatcatggatggatgcaaaagtctccaattcagtcatttatccttttttataatcagataatttaatccattactaattatgtgtataattcatattttatctttagaattttttattttcctctaattttttattttggttccctccactattgagagttatttgctatgatcttatgcagtgacatatttgcataccaatgcagtctatcattctgatgatagttctgctgtaatttaccttgttttaaaaatatattttcttgaatttttattatactaataaacctggaataatttaaaaaataatcatttaaagcatgacataaaactatccattcaatttttgagcaaattatgttggttctatcttcagtgcatatacagagtcccactaccctaatctaaaccactattttcttctgttggctgggctgttacaaaagcctaataacccagcccccttctaccttgcctctccctcattcagttttccacatagcagccagaatgatatttctaaaatggtgaataaactgtgtcacttatgctcagaaacccccaatggcttctcatctcaaaatgaaatccaaagttcctaccatggccagcaaggttatacattacctgatccctactacttccctgacttcatcttccactcttcagctactttgctacagcttcactttgacttctttgctatttattgatcatgccaaacacaatcccttcttagctcctttgctcttattgttaccactgtttttctccagatatcccataacttcctccctttctatttaaataccatcctttctcctcactgctgtgtttattaccctccttcccatattttcttttgaatcagacagatcagtcaatcaatcagtcagtcacttatttttatcctgtctgtgcagaacactgtccaatagaactttctgggatgatggaaattttctgtatttgcactgtccattagagtagctgctagccatgtgtgtctgttaagcacttgaaatgtagctagtatgactgagaaactgaagtttaaattttatttaaatagccacttatgacttgtggttactgtattgtacagtacagaatgtgtgagagagggaaccttaattttattaatgcaacccagtactttagtgcctgctatgtagtaaatactatgaatatctgttgaaagaacaaaagaatggggatacccatgtatcctgttgctccctgaatccttgaatctttaaaaatattttaactttaaaattgtatttaattgacacataatttcacatatttatggagtacagtgtgatgttttgatacatgtacacattgtgtaattagcatattacctcaaacacttgtcatttctttatgatgagaacattcaaaaatcctctcctcattattttgaaatatacggtattgttaactgtagtcactctactgtgtaatagaacaccagaacttattcctcctatctattactttgtatctggactcttttgatctataactcccgattgaacatttttatgtcatctctagcaattcccagacttccaggtgtttggcaatgattctttagatccaggggtcttctccacaaagttcagttgtgcatcaaagatcctgaataatcttctaaattagactagagcatatttggcaatgtgggttacaaacaagggaaaaaatgcaagatataggcaacagatgagggaaatgcaagatataagctcaatcacaaagcttatatttgggggaagtattaaatgaatgtatcttttccttttgcattctagccaggaatccacatgaggtgacacttttcccaagggtaaagagtaccaaatctgtcttctttctctcctttattcctccaaataagagctctttgaacttttgaaaattccctgaagatactatccatcatgaactttgagggaccacgaaataagccactcctactagctttttcttatgttaaaattatcatggctgctatctttataagaaaattcttatgactgaaaatccttatggccaccctttacaataggaactacagttttgaaaaatgggcttagccattttaagtaactgctgaaagatattcttaaaacttaagcgtgatgtatttggtttggatactaggaatgcaggtaatgaggctggcattattatgaaaaattgaagagtaggaaatatattcttgtaggatcccataagcagggcttcaaaatgtagttcttgtttatctaaactaagtaaagcttgtttttctaatcagcaggaaaacagagatccacaacaagcttttcgattatggcttaaaaaaaagcacgaagagcagatgaaagaaagacagacagaagaactaagaaagcaagaggaatgtttattcttccttaaaggaacagaaggccgggaaagggcctttaaacagtaagttaaaggcagggcatttcccccctcctccttcctcatgttcattttaaaagttatatcatcaattaagattggaaaaaaaaaaccctcaaaatgttttctcttacagcacgtacctattcaattttaaattcatgcttttaaaaatgtataattctttaactctattatatatattatatatatggagttatatatatatatgcataccaatttttcttcaagatacttttcaatacttaaattatttcttatggcaccagtgtgatagcctttgataccttatcatttattgtttacttatttctgtgagaaatgggttgaagattggttacagcttctcctacatagccctcagaaaaactgaatttacaaataaatgcaaccaataaaagttgcatttaccagtaaaagaaaggcaggtggactaaggaggaaaatctgtatagaccaaaggagatttgggtacatattttggtaatttaaggcaaacctgatattttttagttatttgggtaagacactgcattgcctaattctgacaatacagatgtggcttcatatttttgctagcaagtgtggggagagttgggggaccaaatgtgaatattgagtccaattgtttgaagttcatttcattctttcgtctcttttgctctttccttcttttttctcttccttcctttttcttttcctgtcacccaggctggagtgcagtggcatgatctcagctcactgcaacctcaccctcccaggttcaagtgattttcccacctcagcctcccaagtagctgggaccacaggtgtgcaccaccacacctggctaatttttatattttttttgtagagatggggtctcaccatgttgctcaggctggtctcaaactccagacctcaagtgatccgcccaccttggcctcccaaagtgctgagattagaggcatgagccaccatgcccagcctcctttttgtttttctaacatacccttttattataacagaaacagtaaatgtgcattgtagaaatggagcggtttcaagttacattttcatcacccagaaattgtgactgttaacaccagtatgcatactgtctaagtatttgtctgtacatgtatttacaatttcaaaatactgagatcatactgtatttctgcaatctgcttttcattaatgatattaccgaatatccagcccatatccatttattccccaactaacccataaatgacttacagtttatttgcttaaactagtagccaattcaggaccacatatcatcagattatgatatttagtaagtttcttttttttctaatacagttatttagttgtttattctgaaaaaaaaaaaacaacaaaaccaggtgtatgtatgtgcatatacacacacacacacacacaaacataccacatacacacttacataccaggtatatatgtatatgcagttatttttgctattatttaaacaaggtttaagacttgaatttgttagaatgtggacttttcctttcctgcttttgatgttttcatgtttggcttacttttcattttaagaactattttgtggacttaaaagctctataatttacctataagaagagtaaggcagcatttctgcatgatagtattcttaacctagctaagtaatgttttagaatacagctagttacaaagagtaagttatttggaatctaccaaatagtaagaaatcctgtttctaaaaaaagaataggatctacagcacacataaaatagtgtttattattaaaaaaccaattaagttggcagtttcattgtaagacagacaatttcaaacatttgaccccaaatctaacggtcctttcttgtatgagccttgggtgtaatctttacatttttcagttaatacttaaaaatttgtgctgtgacagtatttcattgtaaagaaatgtccatttattttgtctataatagtaactttatagcatgaagagtgtattcaggttgatactcaccaaatctgatcatgcctgtttctacagatggttaagaaggaaacggatggaaaaaatggcagagcaacaagctgtcagagagagaactagacagctccgactagaagctaagcgttctaaacagttacagcaccacctatatatgtcagaagccaaaccttttcgttttactgatcattataactgaaagtttctattaaatatttcagtgggcagctgctatcaaaattttggatatgatttcttagggtctgtgtactttggttgtattctaaattatggaaatggtatttatcttttattgacagtgaatttgtttttttaatactagaacaaaataaatttttttctcacagtg

SEQ ID NO: 3 - DNA, 48525 bp, Homo sapiens
  misc_feature (1)..(48525): DNA nucleotide sequence of the entire GAS6 genomic locus including 5000-bp upstream sequence.
aagaaaacagaataaccaaacaactgcacactttgagaaagaagaacgtttgagtatttacactacctgagtatttacattacctgacttcaattcttgttatgaatctactatagtcaagacagtgtggtattaactttaaaaagagacaaacaaataaatgggacagaacagagtctacaaatagatttgcacatatattatcaattggttattgacaaaggtgcaaaggcaagtcagtggagaaagaatagtctttttaacagtgctgggatgattgcatttccctaggcacatacgtacagatacacactttgtttcatacttcagcatttataaaaactcattcaaaatggatcaccatcttaaatgtaaaactgaaatctacagaacttctgtaataaaatctttgtgaccttgagttaggcaaatgtgacaccaaaagcagaatccattaaagaaaataagctgcacttcaaaattaagaattctgatctttgaaagacactttaatttctttttatcttggagacagagtcttgctctattgtgcagaccaggcttaaactcctgggctcaagaaatcctcctgcctcagcctctcaagtagctgaagctacaggcacccactaccatgcctggctaaagacacatttaatagaatgaaaagacaagccgcagactggaaataaatatttgcaaaccacacatctgataatggacttgcttctagaatagttatagaactcttaaaactcaacaaacagctcaacaattggaaaaccaaacatcccaagtgtattagtcaattttcacgctgccgataaagacatacctgagactgggcagtttacaaaggaaagaggtttaactggactcacagttccacgtggctggggaagcctcacaatcatggcagaaggtaaggaggagcaagtcacgtcttacacagatggcagaaagcaaagacagagagcttgtgcaggggaattcctctttttaaaaccatcagatcttgtaagacttattcactatcatgacaacagcatgggaaagacttgcccccatgattcaattacctctcaccaggtccttcccataacatgtgggaagtcaagatgagatttcggtggggacacagccaaaccatatcaccaagtaaaggaaaagaaagaaagtaaaactgaaacagacatttcaccaaagaagatatctggatggcaataagtacaataaaatttgttcaacatcactagttatttgaaaaatgcaaatttaaactacaatgaaataccattatatacatattagagtgagtaaaattttttttttcagtggagtgtagggtttctttttttatttttatttttttattgatcattcttgggtgtttctcgcagagggggatttggcagggtcacaggacaatagtggagggaaggtcagcagataaacaagtgaacaaaggtctctggttttcctaggcagaggaccctgcggccttccgcagtgtttgtgtccctggatacttgagattagggagtggtgatgactcttaacaagcatgctgccttcaagcatctgtttaacaaagcacatcttgcaccgcccttaatccatttaaccctgagtggacacagcacatgtttcagagagcacagggttgggggtaaggtcacagatcaacaggatcccaaggcagaagaatttttcttagtacagaacaaaatgaaaagtctcccatgtctacctctttctacacagacacggcaaccatccgatttctcaatcttttccccacctttcccccctttctattccccaaaaccgccattgtcatcatggcccgttctcaatgagctgttgggtacacctcccagacggggtggtggtcgggcagagggcctcctcacttcccagtaggggcggccgggcagaggtgcccctcacctcccggacggggcggctggccgggcggggggctgacccccccacctccctcccggacggggcggctaaaaatttttaaagtgaccacagaaagtatgggtggggatgtggagcaactgggaccctcatgcattgatggtgaaaatgaaaaacagtataaccactttgaaaaacagtttaaaaagttaaacaaatacctactatgggatccagacactctgctcctagatatttccccaagagaaatggaagcacgtgtgcacacaatgtccacacgatggacacacacatgaatgcctacagcagctttatttgtgatagtaaaaatttagaagcaagtataatgtccctcaacaggtgaatgataaacaaattgtgttatatccatacagtggaatactactgagcaataaaaaggaatacacctgcaacaagatagatgattctgaaaataaatatgttaagtgaaaaaaacagacaaaaaagtgtacatacagtataattctttttatataaaagtctagaaaatacaaacaaatctatagtgatagaaagttggtcagcggtttttgcatagaaactgggatgtggggtagggtggggacatttaggagggaggaattaccaaagggcatgagaacacttttttgggtgatggatatgttccctaacttgattgtgatgatggcttcacaggtgtacacagctttccacctcatggccacagaccggttaaccatccatataaaacatccattgccctgggtccaacctcctgccccctgtggaggtgaactgtctacttcaccattgatatttcaggttgtatgatatagtgcctgacaactctccatttttggaacacatccaaattgtttcttattcattttccatttctgccttcgaacgaatttcctgcactggtaactaggtgaagaattttggagttatctggggtaatggagacatcctccattgcaccgcatatttgctttctgtattccccagttatagaaatcaaaacgagcagttgtatgtgaatgcattgtatcaaaccaagtctctagatgataggaggcattgtcattactaggatagtaactcagtagaaagagtgaattgagaatatgaggaatgagagtggggtccagactaaaaggaggccaggggtcctgaactgccccatccaactgagttcattctgatacctactgatctgaagcagcaggtccacgcccaggtgcagattgtcccagatgaacaggcagaggctagagatgctcattcctaaagggatcaaataattctgagaatggcaagaactccattaactctcttctccaaaactacaaaaatgtgcagaaaatacgaacaatttttaggagcttacactctttgaagtttatccatgggctgctggaacccttaggaaataatagctagaagtgcctcagacactgcctggcacacagcaggtgctcaatgaattacactgcctggcacatagtaggtgctcaatgaattgtctgatgaagtgattaaggagccttgtaaatactgattaaaacatgtatcaccccatccaatttttcaaaccagtgcttctcaagaacaagcaggaaaattaatgtaatattgttttgaagtagccgtggtggtttcggggcagaagcccaggggtactccttactccgcctgctccagtaactagctgacatggaagtgcctcgtcattctggttcagacacaggtgcagatagatgacttctctatcccactttaattctccttgaagatcattcccagggacattcatttgcttaaattaacatgctcggccaggcgcggtggctcacacctgtaatcccagcactttgggaggcccaggcgggcggatcacgaggtcaggagattgagatcatcctggctaacacggtgaaaccccgtctctactaaaaataaaaaaaatcagccgggcgtggtggcgggcgcctgtggtcccagctactcgggaggctgaggcaggagaatggcgtgaacccgggaggcggagcttgcagtgagcagagatcacgccactgcaccccagcctgggcaacatagcgagactccgtctgaaaacaaacaaacaacaacaacaaaaattcatgctcataatcccactttcaaaccagtgacctcaaagatttctagcagcaatcctattccattcttccaattacagaaagcaaagagaaactggatctggggatctaagcgttgagcctgctgagcagaacggccattcatttggggtgaggtgctgactcactgcccctctacattgcattttggggtgtggggatttccagagcaggattctccagagaggagtatccaagctccctcctcccgcagcagggggatgctgggctaactgcctggttcggtcccccgtgagtggtctgctgtgttttggttctgtttgtttgtgtgtgttttgcctatgactttgcgaaatattccaagacaagagccagaaagtcttggtctctgaagacaagcacaatgttgctttcagcttaaatatctactgggaaacctcaagatttttaatgtcatcattatgaaaaacagagattataaaaggaaaccgtcgcatttcactcgctggcccccagtgggattggatctgacctcagtgtatcttttctttggtaggttttaagtcttgacaaaatgtgcctaagaatgaagactccaaaaaggatgcagtagattcggggggagtgggggttggaaagaggcttaaatcttcacatgacacctggaatatggtcaaaatgtacctgctcaagttgaaccaggtattgcgtcctccttttaccccatcgctagtgaagacaaccaccgcctggggagacgctccttttccgaaacactcgagtcccgccgcgtcccggacgctccgctttccccgcgcccggatcctcccgggaacccgcgccccgcccgcgcgctggtcccgcccccgccgcctccccgcgcgcagccgcccgaacacgcccagaccgagcgcttgaggtgccgcagccgccgccgccgccgccgccgcgatgtgaccttcagggccgccaggacgggatgaccggagcctccgccccgcggcgcccgcggctcgcctcggcctcccgggcgctctgaccgcgcgtccccggcccgccatggccccttcgctctcgcccgggcccgccgccctgcgccgcgcgccgcagctgctgctgctgctgctggccgcggagtgcgcgcttggtgagtcccgcgggcccgagaccccgtccccgggcggcgggaggaggctccgggcgcggcttgacgcgtccccctctctccctccgggcagccgcgctgttgccggcgcgcgaggccacgcagttcctgcggcccaggcagcgccgcgcctttcaggtcttcgaggaggccaagcagggccacctggagagggagtgcgtggaggagctgtgcagccgcgaggaggcgcgggaggtgttcgagaacgaccccgagacggtgagcagccggcgggcgggatgcgggggaacccctggcgcccgcgcgcctccaaccgctcccgagaggcagcgctgctgccgccccccagctccgcgcggcgaggcctggcctcagggtcccaggagccccggcccgccccgcgtcccccacgcccatcccccggcgaccccgggatccccgcgcaggccggtgagacgctgcggggctgtccgggaaacgctcgctgtcagacgcctccccgcggggaagccgggagtccgtttccaaagtgcgagagaaacacaatggttaaaacccaaaccgcttccccgcggccctccctctgctgggctggaggtgaggaacccccgggccgcgcctcgtcctcctgagaggggtggagagcagtcccctcccgaaagaggaattgaaagggccgagggcgggaactgcttgcggcagcaggtccaaaaataagattccaggaatcgagcggggccgcatgcgggaggggagggcggctccgcggccccgttctgccaggtgctctcctggaggcagcgggtgctttcaggagcccgacggtgctggccccggcacctcggttaggaatgtccttggagaaggcggggcgcccggggccgcctcccgcaggagccgccgtgtgaggacggcctggccactctatcctgcgggctcgggagcgggtgactttggaaagtccgagaaggtgtggattcccgttgacgtccctcccgccctgaagtcagggtgatttcatagcgaagttttccgttctgctggaatgttccttttaaagaattctcctggggtggaataaatgtcacccgggatgaaagagtggttctggatgaaccatggaggcctgtttccgcttacatttctagtggttgacttgacccctcttagatctgcctttctgaaagctctgaggctgtcagatggccactgtgcacttgtggacatagctcatccctgcagagatgacgcacctggggctgttgcccgggggctgcccacagccccacaggcccgtgccctccttcagctcagcctagcttggtcgctctccccggcctctctgttttcctgtttctttaatgatgaatcctggcctgtgctgctggctgaggcaggtgggcctgtgtgccctggtcgctcggagtcgccgcccagctgtggggttggtcgtgtggctggtgcagtgtcctccaacagcgtcctcacccggaacattctgcgtgcacagggactgtggcatggggcgtgctggtgatgggagttgagggcagcagggtcacccccaccccacagtacccgctccgcgcagccctgcaaggcctggccgcagcccctcctcgctgtcctccaggacctgcagggcccatgtcaatcagactggacgctgcctggatgtactgtgctgttcttcccaagtcagtcccctacctggttttccaattttaatttaataactttatttacaaaggtgtgaaatgaagataagaaaatgaaaacagcactcaggaccccatcactttaatacaactgcggttgcgtcacatggtttctgtgctggcatgttcatctcctcaccctcctgcatgtggctgagtggctttggtgcccgggaggcatccctcccatcctctcacagcctggccccagcagcctctgtcggcttcttttcagcgtcatctcagttcccagcgttctgccctccttcccagcccccatgccaaatgataacaacccgctttccctctggtttttggatctggccattagcttgctgtctgtttctgtttctgtttccggttcctgccggcaggtggatgctggggacagcctggttggggcaggggcaggggcagggtccagaggctggcttgagtcccagccggctccagcacaccaggcccacccctcccaggaccctagtctccactgcatcctctgccacactcttgggagaccccaggcccgaggggactgtccaagcacaacttcctgctaatgcatgaaaatcatccatgaacttctccctgtcaaaggccaggggctccttgtctttgaaatgttgctcactttacattttgtgcagtgcggctgattgaggaaaagggctgtggcctgagctcaagaggtgaccaggacctggccatggtgactgtcagagcatccttgggtccctggcctccccaggcccaggatcctgatgtgtggtcctccacgggtggttgtagggaaggtggtcccagccccctgccattttaggatgtgggaagtgcctggccgccgttagttaacacgcacctacccagccctggctgtttcccctgggcaggctcctacgagggagggaagggacagctggagccagctctccagtgtgctcaccttcatgtccacctgctaaactgctaacctgcccgaagtgtgtcccactgccccttgctggggcatcttcctggttgcgccttcttcccggaagcacccgctgtgcagcccttccagcaggcagatactaagcccggcacccctcccaggctccaggctcacttgtgtgctaacctctgtgcccacctggccacctgctcacctgcctgaagcgtgtcccactgccccaagctggggctgcttcctggttgtgagggaagtgcctgctctgcagacccccaccttccagcaggcggatactaagcccagcacccctcccaggctctggccctccccacacacctgtggtttcaagccctgttctgctggaagggacactcctcccacctccccagccctctctgctggagccgtgcccctcccccgacattcctccaggctgggccacccccacatgcctccttgctctccaccgcccagaccttctccttatcttgttttcctttttatattgttgttctccctccctggccttgcctctccctgctgggttccttgcccgagtttctaattcagagaagactgggtaactccccacagtgtctctgctaaagcttcccaggcccagtgactttttactaaatcctcgaaggccatcaggttccagggcctgctgaggtctccataatcaccccttgattccagaaatgatccgagactagagacttatcccagcccagccctactgcccaggtcctccggtgcctgcctgggagcctgtttgtgcactttgatccccggcctgcctgccggaaaatcatccaggctgtggttcctgatcccatcacctggctttatctgagatacaaagcacaatattcaccgagggctggtggccttccctgagggttggcctggattagcaacctgcacctgtacccgcacctgcacgacatgtggccaggcctgtgctccgaggccaggtttcccttcccccatctctttctttgtctccctctgtgtttctctctctgtcccagtctctctcttctccccactgctggtggtgaggaattctccgcatgggatgttggtgcatccgttttcaaacttgctggctcatcctgaactgcatgtgccctccaagcaccttttccctgaccttgtggattctttgggaacagctggggaaggggtaccctttatggaaatgaaaacccctctgagtccccacttgggaacagccacttggctgggacacaggcccagatgttgggatggcctaaagggaggtccctgttggaggggagggctgtacaatgtgggggcgcctggtggggaaggtgatggccaggctgagacctcccctgccctgccttgacagaggctgcagcacactcccacacacagacacatgcacacacattcacacatggacaccagcacagataggtgctgactcatggatacaggtgtgcagggacacacacacccctacctagacacatgcacacatgtacatatgttcccatagacacagatatacatgcacacacacaggcacacacatactaacagacatgtacatacgtatgcacacattcacatagatatacgtacacacacacactgacagacatgcacacacataaacaggcacacacacatactaacagacatgtacacatacatgcacacattcacatagacatacgtacacacagtcacacactgtccagacatgcacatacaaggcacacacatactaacagacatgtatacatacatgcacacattcacatagacatacagtcacacagacatgtacacatgcataatgacatgcacacacatactaacagacatgtacacatacatgcacacattcacatagatgtacctacacagtcacacagacatgcatacataggcacacacagacatgtacacatacgtacacagtcacacacacagacatgcacacacaaaggcacatactagcagacatgtacacatacatgcacacattcacatagacatatgtaagcacacagccacacactgacagacatgcacacacatacatgcacacattcacatagacatacgtacacacagtcacacactgtccagacatgcacatacaaggcacacatactaacagacatgtatacatacatgcacacattcatatagacatacagtcacacagacatgtacacacatgcatgacacgcacacacatactaacagacatgtacacatacatgcacacattcacatagacttacatagtcatgtacacacatgcataatgacacacatactaacagacatgtacacatacatgcacacattcacatagacatacatacagtcacagacatgtacacacatgcataatgacacgcacacacatactaacagacatgtacacatacatgcacacattcacatagatgtacatacacagtcacacacacagacatgcatacataggcacacacagacatgtacacatacagtcacaaacacacagacatgcatacataggcacacacagacatgtacacatacgtacacagtcacacacagacatgcacacacaaaggcacatactagcagacgtacacagacatgcacacattcacatagatgtacatagtcacacacagacatgcatacataggcacacagacatgcacacacaaaggcacatactagcagacatgtacacatgcacacattcacatagacatatgtaaacacacagtcacacacactgacagacatgcacacacatgcacacattcacatagacatacgtacacagtcatacactgacagacatgtacacacatgcataatatgcacacatgtacacacagtcacataaatagacacatatacacacacaggcacacatggatgcccagccacatgcatgcagacacacacagacacatgtgcaccctctcacacacttttctctttctacaactttggggtcagaagaccactgacagctgcagcaggatcactaaaaagtgacacaaggtcacggggctctgtggccccagcttcctcagacccccagggtctctccactcccagagccccctgcctgaggggccggagccctgtggccaaggcctttcctcctgggcccatcctgaggcctgcaggtggaccccggcccggcctcctctgagggccgtcttccgtgctggctccgcagccctctcctgtgcccgcacctgtgcagatgcttgttttcacccgggcgtctgcaggcacttggtgccaggctcctccggggctttctcagaggcagccgagtgccaggccctgcacacgacaccctcacccgagccggagagcttcacatctgtggaaaactctaattaaagacgttttgagaaacgctgaacgtctccctttgttatttaggaacaaaacactcttttaggaagcaagtgcttatggcttctttcttgagattctgagtaaaggggcgttaagcttgctagctggggcatgctgagcacttcccaggttatggctttaccccagagcgattgacaggcatccaggtttcctcatgcttcattttcccctgttttctaaggttaaaactgagagctgtttctccaatgcaaagctgcttgtttaagggtttcgtatttgatgttggaaatgctctggactcttccatggtttttatattccagtgatttcactgcaaacctggtgtgtacgccttgtaaattttgaccctggccaagtgaaaggttcattttaaaagttttaaaataaattttaaaggggagctggaagtggaataagttaagaacagtatcagttttgcctttcactctgacagaggcactctctgctctgactgacgggtgttgattaaaagtataatattcaaaagaaatagtaaagtgcattgggccttgttaatgttctactaattttctggggctccgttttcaaattataggtgaaatttttttccttccagtgttagtgcctatgataagaaaatacattttctccacatctgtccacaaacctgctagaccctgttttgtgactacctccccttggaacttggggctccatggaaaacacacagcttgacccagccagccctcagagagcctgggccggtcactgcagtggctggattctcagcataaaaaggccaaacgttcggccaggctgggactggctcccatccaggaccaactgtccacagtacagtaaggccactctctgagtcaacattgtttcttttctgaattgctaagttgaccgtccctgcagaagcagagagggctgcggtgtggcattcctgcccactccaaatgagggcagcccggacgcgggagctctcagggaggcgcagtgggctttgggtgtgtctggactgtctccaccacacctggaagatactgttcacttcctttttacacttgtgggaaatacatgacagtgtttacgggcaggctggctttccgtttatttcaaccctgacaattgaatagcagcagcagatgatgaaactgttcacttcccgatcactcccgttctcagatccatcacttagctcgtccgtcgctcagctcgtctgttagtctgaaagatgaatcgtgcacgggtcctcctgagagtgctgttctcggggtctccatgtgtgaagttgttacatcctcatgacaactgtgtaacagctgtcactgagccattttacagatgtggaaactgaggccctgagaggctgtggagggctacagtgtgtcctgggcatttgagccccacactctgtcattaactcctgtgctcgctgggactgggggagagcaggacgcggcagcacccccggccccactgtgtgctcctctgtgtgcaggcgactgtgagcatactggcacccatgtgagggctgagtggtgctggtgtgggcgcataaagcacagggcggctgcggggagctgggtgtgtgtcagtggctcggagcattagtctcgtgaacatggtctgccaggtgcgtcatgctgggctacagagcccatggctccaccataaatggtggttttgtgtttgaacttgagtgttgctgctcagtgaggccagaggaaggcaccaacctgcaggcctggccggtcctcacaacacggaaggcaaccagtccactagagagacatgtgtcccggccactggaggagtccaagtgacctttaagtctcaccagtcctcagagcaacccaggtgaatttggggcctgagcttggtcgtctggccgaagaccagctcaacttggataaagctggaggagaagcctgtccctcaggcagctgccagggcatctgtgatttctgcttgcgtgcactcttggcgactattggtggtggtcgcagtcagggcatctggttgcctttactgtccttacaccagctgggcagagctcaggctgggagcccagtgggagaggccggggcgtgactcccggcgcagaagcggcagtggcacaccggcgtcccaagcacagctgtccctgccaggcccctgcgcgttggatctttgggttgagtcatgctcgatggtgcagccatcctttcaagggaactgagctgtccagcgtcccatggagcagctccccgtggatccggagaggccgtaaataaacctccccatttgtaagccgggaacacacatgaactttgcaatcgtgtttgtcctgggatcatagaacgtggtggctggcaagacccaggcatcctcatcctgtgctgctgtgaacagaggccggtagcttattgagggaccagtcccagttcgctttctgtggggaagactctgatggaagcctaggccccaaactccaaggttagcacatcttcttggggggattgacacctccaaaggtgaacttgggtccaaggcacgtgtgtgcgacctgaagcatgggtgccgtgtgcaggagacgccctcaccggagatggggaccgagtccacacggctctaactgcagaatcactggccctgtgcccacgactattttattttgctgttttatatgatcacaaagtacactgtcttgtttttcccaaagcatttgcagtgagacatcccacttcctctccacggcagctgttgcgggcacgaggctgctcccaggacagcgatgccaccggggctggggtgggcacggaggaaccctcttccttcctcctccccgccctctgctcccccacagactggcctgtctttagtcagcactttcccaggctcccttctgcccaccacgtgcaaacagtggcgtgtcctgggcctctctccttgtagtgtttcttgtggccagcatccctcccatccaacagctgtgtggcttcctgactggcttctctcagggcccgcaaggatgctgccaaatggccagagacagtcactgctctgcacttcaaagcaggcagccctcggtggggcttgccctgaaagacagcgggccttcctcgatgagagcctgtgctggctcagggcctgtgggggctgcagctctgttccttccctgcgtccacgctcacatgctgaatgttgtgcaccacaggacaccctgctgggggctgtcgggagcatgctctgtgtttggggcagagacgggcagagtgagtctcagcattactgccgtgcagggttgagtctcagcatgacttccatgcagggggagtctcggcgtcactgccatgcggggcgagtctcggcgttaccgccgtgcagctgctggaagccactcgagctcctctgtctcgtttgccatgaagcccatgagagacactgatgtgtgtctcggggcttctgtgagaagagcttggttacccaccgggtcaggcaccacgtcggtgctgtgaggcatggagggtgctcacagctgtgcagtcagctacagaggcctttcccagcatccacatctgaccgggcagtcacaccaggatgagctcccaggaagagggctcccagcaagggagggcgcacctgggtgtgagcttggaggagggcagaggcacctgtcaccgctgaccctgggtgcagatgggcatgccgggtatactgactgtgctttcctggggcctgtctccctccaggtcagcctggggtcctctgggctgggggccatgcactgcctcctgtgggcagtgggatcagcacttccactttgctcagggctagagcaggctgctgcgggtgtgaagacttaggaaacgaattcggaaggaaggaaaggattttgcacttcccaagctagaagaacatgaatagagccgggctgccaggccaagggtctgtaagacggcggctcttcagagagtctgcaaatgctgagaaaggaaggctccccaagggcagttcctgtgggcgttactctgagttttctcatagaagtcaagttcttggaagacagcactatggtcaaagggttagtgaattcttgtgaccatttcccatggaaaatatcagagaaagttatggtgttgataaacagagtccctgtgctcagcagtctccacccacttgtcaagtaagataaagatttttggaaacaaaatttatggctgttatttgctaaagagagtaatacattcttagcacactctgaaaaataaccactatttgctgtatgaatgcagatgaaactcacacaaaaagatttatgcaggactgacatcgggtgtttgcagaaggttctccacgttcactgacctctgatcctcactgcagctctgcggggactgtggcccaaggatgagtgagcgtcaggtcgggccgtgcccttaatcccctggctgcccctcaccaccaggcagagaccttgctgggacccaaggagttaaagtgtattcagagatgaaggtgtttaggaaatgttctggaaccttccaaactgactttaggctgcgtgaggtgcttccagttcagtgcactttgggcccaaaagtgtttcctgtcttgttaatgcactgtgttgtgtgccatcaccgcatggaggttttggccatttttaaaaagtgaatgggccctcccagggtctagttggatcgagagaccactggaaaccctcaccaagctgcaggcaggtaggcaggggccccagagcaggcctaggggaagagtccccccggccccttggagggtctcttcacgtgctgggtgctgcctgattcctgcggtggcatggggaggtcaccccaccttgttctgaaccacagctctgggtgaggaagcctgtcaccaggttaaaggtcatttgggggttggggcgtgagaaccgcagtgccctgctggtagggttgccgcatgggtggccaggctacagcctggtccccgaggccgacccatcctgggaaccctgtgtgcagctccctgccatgcttgacctttgccctgtgggtggctttgagcgggggagacctgggtctggtggtgggcagggcaggggcggaggtggacttgggtctttgtgacactgcaccaattcccatggattctgccggcacccactgccctcctgagcagagcaaaggcagcagaggcggatgccagggtccggaggtggcatctactcatcagacactttctgtagttttataacaaatttggggcctcatgttagaccccagccagaccaggctcctgtcctggggctcagctccctccaagctgcttcaggttcagtttcctccatgcttacgaaaccgaagggcaacgggcacagtcagggaggcgtcagaggaggcaccggctccactgttcacaccgggaccttctgcagacggggctcccagcctcgaccagccccggaacccccagcacggggacgtccaatcttttggcttccgtgggccacattggaagaagaactgtcttgggccacacataaaattaacactaacagtagctgatgagctaaaaagaaggtctgtgcctaaagctcatgttttaagaaagtttacgaatttatgttgggctgcattcatggccatcctgggccactcacagttgcgccagagcctcgggagcacaggccgagcacctgccctgcttcacccagggacggggccctgcactgaccaggaggctgttgccctccaagtcgtccctgccgggaacagcaaagcacacaaacctccgagagacctaatggctgcatcctccgtgcagtgggcaccacgcttgccacctagaagagtgggtttggcagatgtcagttaataacaaggatgtaagttttaaaatcacgtgggggtttgtaaacttgaggaattacagcacaaacacttccatattattaaaagaaacagactgggagcattgattttgacttttcttccaagtacttatctatgatttaagtgaaactgagcattcagtgctctgtgggagtgaaaactgcaggcccttgcacttgcccactgattcattcattcacccatccacccactcattcattcaactatccatgcactcgctcatccatccatccactcattccttcatttattcatccatctccatccatccagtcacccattcacccactcactcatctatccactcactcacccacccattcactcatccattcacccacccactcacccacccacctattcattcattcatgtattcatctatctactcactctcattcacccattcattcattcatctgtccatccattcacctatccacccactcatccattcatgtactcactcatctacccactcactcattctttcattcattcatccattcactcacccatccacccactcattcattcactcatctggccactcactcatccacccactcactcattcattcatacactcactcatccatctattcactcattgttttattcattcatccatccatccatccactcacccatctatctacgcatttattcatttacccactcagtcatccgtccatcctcattcatttatccatccatctccattcatttactcatccacccactcattcattctttcatccacccactcatccatccactcattcatttgttcattcatccatctctatccactcatccattcattcattcccattcactcattcatccactgattcattcattcattcatctggttattcacccatccactcacttatccatccatgcatctgtctgctcactcatccatcctactcactaatctatccaccgattcactcatccatccattcattcattcatctgtgcatttatccatacatgcatctatccatccatctatccatctatcaatccatctgttcagtcattcatccattcactcatccatccatccacccactcattcatgcatccatctgcccatccactcatttattcacccatccattctttcacgcactcatccactgtccatctgtcatccatccatgtgtttggtgacggctcatgaggcctctgggggacagtcagcaccaggctcggtgctgggcaggtagatgttgtctttttcctcttgaagcttcagctaacagtgcagtggcttggggtttgctcacttatttttatctgtagctgttcaaataaaacagaagcagatccccggggaaaggatttccaggggccaaatggcgccatttccagcctgggaatcccagcttcttccccctgttgccctcacctaaccccagcacgccaacccattaccataggtcttgctcttcctaggtttagaagaaagagagtcagtgtgtacataaggagctcctggttctaaattccggcctcctgagtggtggcctctgctccatggggactcctgggggtgctgctctggagatatggctaatgcagggcttcaggccaaggtttatggacctgaacaagcagtagtgcagacaggggtgggagggttttgaggacaaagtgctctgtgtttggttctgcaggtcagggagcttatctgggtgcctttactcaaagccatttctgggtcttacatctttggctagaatgttctcaggacaatgtgaaatgtctttatctcaggagtgtataccagaatgttctcaggacaacgtgaaatgtctttctttcttgggagtgtgtaccagaatgttctcaggaaaatgtgaaatgtctctttttctttctctcaggagtgtatagcgtttttaggtttattcatcttagcttttctcttgctcatggtttaaccatctttcccctagtttgccggtggaattagcatatgctttctgcctccattactgtctcaaataatcaaacatgcaaattaggatacagtgcccagggctataaccctgtggtttcagaaaccccattcccataggtgtggcgaactgacaggagattggcatagtttttccatgaataatgcctttttgcaacaataaaacttggtattaatacagattacacattaagtagtatgactagtcttgattttgaaaaatagaacacacttgctgtaaagctgtggtaatgcaagcatttgtgtatagttaggccgtttgctcactagttcttagttgttttcaatccctggcttctaaacctgaaaggacaccttttgcatccctcgcaagtcttttatttcagagccagagcctcctgctttgagacaaagccccatcacttcccttctccttccaagcctagaaacctggtgccacttcgtgttgctccaggactccaccagggctcacttggtatggctgttcttgccttttcttggagtttgccaacccatgactaaaattggaagtgagagaaatgagggcaggcatgagggtgtgtgttccaggtctgcagccctcctggccttcagggcggccgccctcccaacagacacgtgagctgcacaccagctcaccctgacccttcctttctcttaagggagtaagagtttaagagcatcccatctttcctagaacacaactttgtgaaaacacatccaagcaggcctcaggagggtgttggcaaggctggggcggggcctccaggctcttcccacaaaaggtgtggcaaggccagcaagtgtgggagagaggtgggaaggaggcagaaaggccatgcagagccagcgcatgaagccagaggcgcgttgcagacggcgctgggtacctaccgcctctgtctgctactctgcaaaatgctaccagcgcctgctaatcctgaccttcatgcccccaggtgaatcccacaaccatcctgaagccgggtttcctcattcctgataatgggattaaaaagaccttcctgggtgttatttgtgaggatttcataaaatagtgtaaaaatgctgactcatacccagcatggagaggccgctgggactattctgccatgactgtggtctcttggtttagagcatttagggccaaactgctggcatggttgaccctaagctggagattggaggctgctttaaccaggctgtggccctagaatctgtgggccatggcaaaaggatcctgaagaagtttccggccggcctctgctggccaagtgacaggcaggtggttccaggactcgacagctcacttgtgtcgaatgtggacctcgtcagtgcgctttcatggataagaagacccttcattacagcctccatcctcacccagtaccaattttgtttcaccaatactataagtgcaaatcaatgcccgtgtgccaaaagaaaggtctttggggttttgagagacctttgtgtcaacagggaactaaggtctttgggttttagagacccttatgtcaacagggaactaagagtggggttttacttggaagcattcttgtcctcctgggcaggcctctcccctggacacacctggtagcacttcctacgcagctggaaatggccctgcctttgcttgttggtctcacagcagtcgtgccccggtcacttcccctcagttccccgggtggggcggccctctggctgccccgagagcagcctctgattaaccagctgatgcttatgttgttcagagaccctcgtagtgtgccggtcaatgcttgccttttctttttctttttccacaggattatttttacccaagatacttaggtaagtctcaattacttctctactctggttgtcgtagaggcatagttgggggtgcgtgtttcatgttggaggaatctcctcaccacgtaactcttggaaggaagattcttaatcacatggtgcacgtggaactgtccggaacatgcaggtcagaaacacaagtttctctctttattttataccacagctttattccgtgttagtggaacctcaggtgaatgctgttatctgcaaaccccttctctgagttgatgccaggctcagctccttgtcaggacgtgtaattgattttgtcctccggttttctgacctcagcactaatcacttctgaagtcattgaggaccccaaaggggtccatgttcatgtgggctgtattgactgatatttaccgtattcttaattaaaaccgaaaacactgaatagtgtttctgtttaatttgaagaacgggaatgccagacgttatctcagccatcagagcagctggtgcatgtggggcggcctctggagacccccactgtacacttgggaagggaggacagcaagaaagtgaaacccagagaccccgggtcagcccgtttaactgacaccatcttagagctctttgagagcatttcacttagaaggagagaaatgtattccagggtcttctttttaatgttgcaaagtgcattttagtaaatgtcctcttaaagggtccttccctgggtccatatctggaacaaacacagtgggtctggcactggcccagaaagcccaggcaccagcgaggactgagttctgaagcagggggtggccagcggtccacagcacacctgcaggaggccttccgctgttcatccgtgccgttctgcgcctggataagcaacagtaacccactgaagggccaggtcgagaggccccgcaccgttctgcacaacctcacgcttcgggttatccctggatgtgcatgtgccaggcctcgcctccccccgccgccctagcgggatgtctgctgtcaagctgtgttcagccagccagagagcatggaggggctttctccaaagcagagtggctttccagttaagcacagcgtttcccaatgggggtccactggaaaatgaagtttagcttttcgagtaccgtcaggaacttactgagcattcccggtgattctcccgtatggcaggaggagccccctcgaaacggcgggcggtgctttacgcacttgactgtgggtgcacaactccgctgagttggtggaggtggtttcctgtttgtcagggttggggctaacatgttttttattaacacaagctaagcggcattgtttctggaggatgatagcaccccaggtaagcagagtaactgcctctccagagcgtctcagaagcagaggctctgcagtccatccggtcttgtaaggatgactgacatccattccctttcttcctgcagactgcatcaacaagtatgggtctccgtacaccaaaaactcaggcttcgccacctgcgtgcaaagtaagtcggcctcctttgcgccttcctgggagcactgtgggtttgggcggctttaggcttggctgtggtttgtggagggccctgaatagttctgttttttaaggagctgtggtcccttgccgaggcctgctcccttttcgccaaactttcttttttaaacaagtaaattttgacgtttttagcaataggcaataaatgcacatggaacaaaatgtaaatgtttcacagagtgtgatgtgaaagcccatccccgcctctgagtcgtccagtcagacaccaccgtagttacagttccaagaatcttgtgcttagacatgtaaacatgtgtgagcggccttccgctcttcacacgcgtggcggcttagcacacacggtctgtcccgtgcctctgcaactctgtctgcacaggagaccctctcttagcgtgtctcaccttcacgctggcatttccagccggtgcatcatatgaacttagcccatgcatattggctgatgtccaggttatttccaatttccatcatttaaacaaaactggcgtgacatcctcatgcacctgttgcctcccacacgtctgagtgtctgcgggatgcgttcccaaggatggaatcgcagaggcagtcctcatgtttcctttggatacagatactgccaaattatcccagagccagccttagcctccgcccctgcaggggtgaatgaactgtttttttaaacttttgatctcttccaatgtaacaggcgagaaatgacatcagtcatttcaggtttttttttttttttttaactaatgagtaaagctgtccttcataggtttaaaaactgtgtatttcttttcctataaactgttgtttatattttttgcctgtttttctcaatttgtaggagtttgcacattagccattggtagtaaagttatcaaaaattttttcagcttgccacaagtcttttttattattttaaaattatcatgcaataagattgattgttttgggtgtcctgtatgaattttaacataccttcagcacaacccacacagctccccttgcactgggtctgtggtccgctggcgtcacgtgtgtctagttttagatgaaagtccagcttggtgagtccctgtgggcgctgagagcagaggcgtggcgggacggagtcatcctgggagaggcaggagtctcttcccaggcatggctttggagctggatcccagtcagcagaaggagtcagaggtggctcagtcccgctccccaagccccacgcactgtccgtgggcgtctctggcctcccggacttgtatcacagaccccagcccaagagacacaggcagaggaaatgctcagtgtaaacatgggaatgggagggtggccctgccctgtggcccggcctgccctgacctgcaaccatgcacagtagccaggtgccacgtagggcccaatgtctgcatttggggcagaggctcctgcgtgctcagaggagacaagcagatcctgtcacgcgtgttttatcttagtgattgctaaaccagtctcttcttttaaattctgtattcacacttgttatactctcttagttcctgggctttaggcttctccccaagattacaaaacagttacctgctgttaggtgttttcatctgtgacccgcccgtaatttcttttgacgtgatggatgaggtggggatctagactgcaggctcagttcctgccccaacaccacacatttgagtctgtctcaccccagtgcctcacctgctgccgtcctcatatgctgggtatttgggagattttctgccgggtttccacaggccgtggccacagctttagactcggcctcatgcacgcgggtgggtctcctatgccctcctcagtcttttttctggttgtcttgcttattttttaataaaactaaaccttaaaaatattcttaaaaacctaaaaaagccctttagatatttttaactgggcttgccattcatatatcggagactgtgtctgaacagtgttgcgctttcctaaccccggcaccgtcctgtccgtcccttggagcacttttcttcctgtgcgtcccgtgcttcctttgctcagttcacttctggctatttgcagcaaagaaggccgtccttttcaaggcgtcgcctcgcttccttgcatggatgaagaggagtgattgctacatgttcctttctgttcccgccgcccaatagagttatcttgttttggttatttcctttgtggcatcagcgtccccaagtgcggccagctggggagaggagggcaaggtcaagatccttgagtttgttccctgtgtgataggaagagaatctcttgctgtggctggtgccagaggcaacacatgcagtttctaacgggtccacctgccccaggccagaagctccggccactctccctgagccggccctcagaggctgccctgcctgtggcctggggctctcagcttctcctccagagcacgtggctggggcctctgatgttcgcgtgcctcaaaagatgcctggcggtgaagaaggtgctttggtggcctggccacagcaggcagccttgcactcccttgggaaggcgcctcccggaggatgcagctggggcagcctcacactctgttcctgttcattggttccctcgtgaaaattctctgacttggtgctcacggtgctgtcctggcttcagttcactggttatcggtcattgtgaaattaaagccatagccccataaagtccaaattcagccccagacaagcaggcccccagcgggccttgcatgggagcctgcggccctcaggctgtcccaggacccaggcggcacagtggacggagggaggaggcctgggaagagtgtaggctgcgttcccaggtgcccctgaagagcctctgcttccatttctttcctttcccacggacacacccagcttctccactgcgaacgcgcccgtcctgccatagcggccacttggtgcttggatttctcggctcctttgacccatgggtttccccaggaaggtcaggtccccacaggcggtggcccaggcagcggtcactgagccccggctaccgggatcccacccccgccacggggagtgtcccctcgcccttccctcgggcagacagggctctggtcctcgctcgtcaccacccagggaaaggccctggccgcccgcaccggcttcagattccagccacagccacagccgctccctcctgtccttcaacgcagtcatgggccaagctgagataaacccttcacctcctgaacaggcgctggcgcccagggcatgaccagccaggccaccgataccctaggcccagcttgcgggatggggatcagggaggtgggcgggggtcagggaggtggacggggtcagggaagtgggtgccctcgggggcctgcagaggtttctgtctccatcgctttccctgttgtgtggaggaaattccacagatatttgctgggcaccggctgactgtccacccctcaggtgtggttccgtccttgcatcctagaggtatcaatacattcccaacagggaaataaacaaatgagttgggggaggccccggggcaggtggcatgagtctggggaccgcttaagagctgggcacctggcaggagcaggcactgtccctcagcctcagggacagaggtctttccgaaaggcattccaggcaaagtcaagaccgggttcccagccctttgcatcacatgggcaggtgtccacttctgaaatggctttaatctctaaccaaacatcgtagcggcagcgcacagcatcccccagacatccctccatggtgggggcctctgaggaggtcaggttctggtgccggagggttgggccctgcacaggccgcctgccctgcacgtgtctgactccctcctgcccccagagcctcttcatctgaggccagggtggagaagcggatacgcccctcatttctctagttcaggccagacctccccgttccaggccctgctatgaccacatcgacgtctccagacgccccgcggacacagcacccaggtacagccgggcgacagcagtgtcagggatggggccccggccggctcctggcggctgtgctgatgcagaatccctggtcctggtcctcgtttcctcgtaactccgaaggccagccccagcccctgtgtgcttcagagtagaaagcgtttatagtgacctgctgaaaatagcatcttagaaacacttcgagacgcgagctccgtccacacccacaagtgttctgttgtcagtcatttgtgcaaaacaagcaaacggaggtgtagggaggaaactgtggggtgtactgaggaaactgaggcttatagaggaaactgtgaggcagacggaggaaactgaggtgtatggaggaaactgaagcatacagaggaaattgaggcgtatggaggaaactggggcgtatggaggaaactggggcgtatggaggaaactggggcgtacaaaggaaattgaggcgtatggaggaaactggggcgtatggaggaaactgaggcatatggaggaaactgtggggcgtacagagaaaattgaggcgtatggaggaaactgtggggtgtatggaagaaactggggggcgtatggaggaaattgaggcatatggaggaaactgtggggtgtatggaggaaactgggcatatggaggaaactgtggggcgtatggaagaaactgtggggcgtatggaggaaactgtggggcgtatggaggaaactgtggggcgtatggaggaaactggggggcgtatggaggaaactgggcatatggaggaaactgtggggtgtatggaggaaactgggcatatggaggaaactgtggggtgtatggaagaaactggggggcgtatggaggaaattgaggcatatggaggaaactgtggggtgtatggaggaaactgggcatatggaggaaactgtggggcgtatggaggaaactgtggggtgtatggaggaaaccggggcgtatggaggaaactggggcatacggaggaaactgtggggcgtatggaggaaattgaggcatatggaggaaactggggcatacggaggaaacgcgggtgtacggagcaaactgtgaggcatacggaggaaacgctgtgaggcatacggcgaagcgtcgcagaaagaagccagtgtggttgggcagcttccccaagaagcctgggactcgtagccagggcctctggtgagcgcggtgcctggacccgcctaggaggacaggggctgtgtctgtgccggccacaggcagtgactgtaagccctggatgagctggaggaactcagctttgtgaaccacagacccgcccgccgctcaccctggcaccgggcacccctgaccccggccaggtggggatggaagcggctcctgcactgacagccgagcccagaccctctggtggaaacgccacattctacagacctggtgggaaacgtcaccttgggagcctcaggaacagaagcgacacgctggcagtgagagcccatgcactgaagactcgacgtgcccccaccagggctgaccccttaggacgatgctggcccagtgccctagggccctgctggcccggcctgcacttttcccagggactggtccttattgaacttgtgtggaatcaatggaccggagccctctctcagccagcaggggggccctacccagggttccccacggagccctgtgtggctaagctgagcgtggctgagtcctcatgtggggctgagctgagtgtggaccgcgcccctgagcactgccatgctcagccccgagctgcttctgctctgccagcagccatgaaaggattctttgagctccgggtgtaattgtcgttctttctgccaacttcccggggctcaggcttgcgtaactgcactgtcgggggcttccctgcctgcctctgggacgtggtttgggtccgtgtcctggaagcgtgtttgtgagcagctcctcgtatgaatgtgtttgtgagcagcttctcggatgggggactgcttgggaagcagctgcactggcacgggttcccaccctcaggccctcacccgttcccctgacctctggccctgcaggagctgagcccaggtgaccaccctgagaaagggcagaacacacctggcctaaagccatcaagacacgtggagagggggcagctaagcagaaagaggggggcttcctggaggacccctctggcagtgcagcctgggcctggggtcctccccgccacacccagcagggagagttcaccagagatgggctaggggctggccagggaaggcagaatgttccgagtctgcctggaagcccccaggtcagctgggggttctgtgtgcctactccctgggaggtctgagctcccaggcctcacgccaggcagttcctgctcctttgccctcagcccttcccaccttgcgtccaggcctgctggcactccctcccagttgatctgagttttcctggagccggccccagggcccgccagcctattctgtcagccctaggccagcacagagggctcgggtgcccaggggctgcctcagcctgcgcccctcagagctcctccgggctggacccgagaccccacagccgccccgatctcagctgcgttgggcgcgcaggggtggggcagctgaacatgattttccactttgtgtccccaatcagacctgcctgaccagtgcacgcccaacccctgcgataggaaggggacccaagcctgccaggacctcatgggcaacttcttctgcctgtgtaaagctggctgggggggccggctctgcgacaaaggtacgtgaggctgaagacaaaggcggggtctccctccatctccgaccctgccctgatccccgctcctcactcccactccggggcacggccatcctcaggctgctctccgacagccccaaggaggctgcagccctgaggtatcctggagccccaggagaattgggaggagctgcagtctcctttctgggagcagggctggaaggaaaggaaacaccaagtgatgcctcagcacccactgattgaagggcggggggggaaatttcacctctgaccgtccttgagtgcagacctgtggtgtcagtggcacccactgattgaaaggcgggggggaaatttcacctctgaccgtccttgagtgcagacctgtggtgtcagtggcacccactgattgaaaggccggggggagatttcacctctgaccgtccttcagtgtagacctgtggtgtcagtgaagaccctggaggaagaatagctccagggcctggtggagacccatagtggagagcccagcaggccagcctgtcccctttggcaaatcctaccccacaggtggcctgggagggctttgctaaggagtggccagctctggcctggccttgtctgtcctcggcacccagaggtcactcctggcctgcagcctcctcctgcaagcacatgggcatccagggagctgagccctgtgggctgtgactgccagcagctccccaggctgagaccgcagctggggatcccccatgccctcccaccatctacctccacacgcaaggccaggaccaggggccatgaaacgctagggctgctgagtggggtgtgaggtccaagccctggggtccctctctgctccagggctgggctgtgcacctctaggatctctctctgctcgggggctgggctgtgcactcccaggctctctccctgctccagggctgggctgtgcacacccgcggtcccttcctcctgctccagtgctgggctgtgcacccccccggctccttccctgctccagtgctgggctgtgcacccccgggctccctccctgctccagggctgggctgtgcacccccggggtcccttcctcctgctgcggggctgggctgtgcacccccgggctccctccctgctccagggctgggctgtgcacccccggggtcccttcctcctgctccggggctgggctgtgcacccccgggctccctccctgctccagggctgggctgtgcacccccggggtcccctcctcctgctccggggctgggctgtgcacccctgggctccctccctgctccagggctgggctgtgcacccccggggtcccttcctcctgctccggggctaggctgtgacccctggtctccctccctgctccagggctgggctgtgcacctttgggatctctctctgctccagggctgggctgtgcacctctgggctccctccctgctccagggctgggctgtgcacctctgggatctcttcctaccgtagccaggggctgtgcacccttgggctccccttcaggcctgtgcttgttcccagatgtcaacgaatgcagccaggagaacgggggctgcctccagatctgccacaacaagccgggtagcttccactgttcctgccacagcggcttcgagctctcctctgatggcaggacctgccaaggtaaggccctggggtgaggcctctctcctctctcctctccccaccttctattttcggtcatgtctgctcttctgcaagcggctgctgctggctgggttcctgtggttctggatgggatggggcatcctgcagagactacacaagcccaggccagccgcagcacagggagctgctcggcaccacaccaggatgactcacccggcatctgagggccaggactcagggggccggcccagcccatgaggccacactgctggctgtagggcctcgtccattccccagagcctcacagagcctggaagtgctccaggcacttgtgtagtgagcttgtgggtcagggctccaggctagggtccccccgccgtccactctccccagcatccccagaagcaccccgttgttggtctccctctgtccactaaatatagccctgccctccccacttcctttcatatttcagtctggggttccctcagcccagggccagagctggggagccccaggacaccccagaaagtcactgtgaatgtgcgcgcccccgacgctgttccaggtgctgctgctgccactggccctttgccactttgcagggggagcaccttcctcctccctccccacgttgtatctggacatgcccaggcgtgtccctgagagtttctggcatagttcttagcgctgctgctgactgtccaggacaccgaactgcgtggacaggacagacagttgctcagggagaaacagccccaggatctggagagtgaatctgaccagacaggaggggccacaccccatcccccgatttcaaaaggcagctgctatttctgtccactttggtggttcccttccctgaccacccaggagttagccctgtgtgcagatgacgtgattcccatcttaacacataaacccatttccccgccgaggacagagcccctcccatcactgctctatccctgacctggaagacagcagcaccccaggtttaaagagaggtgaagactaggccgatcctgagagatgacgtctaaagcatctcccgtgggtccctgcaccagtcgggcactcccggcaaagtctaggctcacagttactgcccacagtgacagaggcattcccgtcctctcctcctcctccccatcttcctcttcctccccaccattccccctcctcctttccccactccccctcctcctctccccactccccctcctcctcccccccactccccctcctcctccccatcttcctcctcctcctcatcttcctcctcctctttcttctcctcctccccccactccccctcttcctccccatcttcttcctccccctcctcctcctcattcccctcttcttcctcctcattcccctcttcttcctcctcattccccctcctctttttccccctcctcctcccccatccttatttcccctctcctcctcctcccccacccctccccaccccctccctcacccctccccaccccctccctcacccctccccaccccctccctcacctcctcccccacccctccctcaccttctcctcttcctccctgcttctcctcctcctccccctccgtcgtcctccccctccgtcctcctccccctccgtcctcctccttcccttccccattctcctccccctccccctcctcctccccctcctcctcctccccctcctccccctcctctccatcctctccctaccccctcctcctcccctcctcccctccccctcctcttctccccctccccttctccccctcccccttctccccctcccccttctccccctcctcctcctcctcttcctccttcccctccccccttcctcctcccactcctactcccccttctcctcccccacctttctccgtgcccctgcctttgctctcctctggtgactaaagggctcttcatttcagggttgcccctcctaccccagggtgcttggccgtaaacagcatctgtcccacattagatgctcaagtcttaggattgtggtttaacccggtagtgaaaattgattgaaaccagtaaatgcttctctttggggttggggttttagtttcaaatgcccccggggggttactttttacggccccgtgtcctgtagcaccgtcatttaaatggaacagcacagcgtgcaccgccgccccccacccctccaccaagcagggcccttcccagctctccacctgctgggctgaagtcagccttcccagccgggccttgatcagaagcgtgcaccaacaccccgggagctgcccggtcaggggaggagggcagggaaatggggccagggcgcgctggccccacagagtctggatgcgacctctgggtggtgccctggccagtccctgcagccgcctgccccagccccgtctgagatgccgctgtgctgcggttggccggtttttttttgcttgcagacatagacgagtgcgcagactcggaggcctgcggggaggcgcgctgcaagaacctgcccggctcctactcctgcctctgtgacgagggctttgcgtacagctcccaggagaaggcttgccgaggtacccacgccacgcggtcaccctcgctttctctgacgcccaagtctagacacgggtgccagtcactgcccgagccggttgctaacaaccgggtgcttctggtgaaagaaagtctctttctccctgtttctatcagcctggtaatggcctgtgctaccaccatgcccgcacacacgtgagcacacacaggcacccatgccccttgtgcacatgaacgaaccgcacacatgcatatacaccgcatgtacacacgtgtgtacccttctccacctgcatagacggggcctctccccaaagggacggggagcagcaagcctccctctactgttctctctttccagccgccatggggagggccctgttggccgtagagcctctaagaggggccgtgcccccagtgatgggaacagtggggctgagtaggcagacagagagggtggggaagcccaggctgcctgcactgacctccatttcccaccacagctgtcggcccctctgtgctccgggggacacctcactgcacagcccagaccctgtgcttcccagacctgccttccacaccggcccggcagcgggggtgggtctggctcgttgggagcaccctcctgggacacctgcgacatttttattccctcaagaaagagcccgggcaggagcaggccgagggtgcaacctagctttccagtggggggggacgcgacccccaagccgcccccgttagaatctgcatgtaattccttgagcgcaccttgcgtgtggtttgagcaatcgcggtgtgatcccacggcgggacagcgtagaggcctccccggctcaccgccgcttccctctggctggcagatgtggacgagtgtctgcagggccgctgtgagcaggtctgcgtgaactccccagggagctacacctgccactgtgacgggcgtgggggcctcaagctgtcccaggacatggacacctgtgaggtaggcggcccctggccccgcgggcccttcacggtggttccgggggccctcgccggtgggggctttcgggagaaacacttccgtgaagacctggcctttgctaaggtgttggggatctccagggccatgtggaggtttgggatgagaaacgcttctgttccctggaagatgtttggttgtatttatagagtctctatggcaactcccagctcacagtggatcagcctggtgtggaccccagtgtgacactcacgggggcacggtccccactctgccgcgtgccagggagccaacgtgaccgacctgtcacaccggtgcctgtcacaccgacctgtcacaccggggcctgtcacaccggtgcctgtcacagcatgacctacctgtcacaccggggcctgtcacactggtgcctgtcacaccgacctgtcacaccggggcctatcacagcatgacctacctgtcacactggtgcctgtcacaccgacctgtcacaccggggcctatcacagcatgacctacctgtcacaccggggcctgtcacactggtgtctgtcacaccgacctgtcacaccggggcctgtcacagcatgacctacctgtcacaccggggcctgtcacactggtgcctgtcacaccgacctgtcacaccactgcctgtcacactgacttgtcacaccagtgtctcacaccgacctgtcacaacagtacctgtcacactgacctgtcacaccggtgcctgtcacaccactgcctgtcacactgacttgtcacaccagtgtctcacaccgacctgtcacaacagtacctgtcacaccgacctgtcacaccggtgcctgtcacaccactgcctgtcacactgacttgtcaccggtgtctgtcacaccgacctgtcacactggtgcctgtcacactggtgcctgtcacaccgacctgtcacaccggtgcctgtcacaccgacctgtcacactgacctgtcacaccggtaggaatgcagtacccacatgtggacgtttctgggcagggcggctcttgtctttcctcttcagcctgggcctgtgcctgggggttgatgagagtgagcatttatttaaaaagcaaaaccacaggtggaaagagtcaccaggacagcttctcggagtcgcagacctgggatgcagccgtggggctcttgggtctgggctgcgacgttcagggcttccagccagccctcgccttgaggttctttgcctcgctgcctcatgtactcatgcagagggtgtcggacccctgcgagatgtccagctcaccctggctgcccacggtgggcagggcaggcctggctcagccccagcccctccatcttccaggggtgtcagctcacaccggctttggttctgtcccccttcgggcagcgtggagaaaccacagcccagaacagggaactttccaggacagccatcttcaaggcatccatatctatttcataatagtgtatactttttaatgattctctgtaatttttgtatgcttgaaatatttcataatttaaaaataaagggtcaagggaaatgagcagggaaggagatgacggggacccccgagaagccctgtgggaagcggctgctgcaagcccgcccttcacctgggagtcccagtggggcaggtgtgacagcctctggggtctcagcagctagaggcggggtggccactcccgaggcacaggagggacagtggacccgctgcgcggccggggcgtggggctcaggggagcaggagtgaaggccacatccccgaccggcgtggcccccgtccgtggcaggacatcttgccgtgcgtgcccttcagcgtggccaagagtgtgaagtccttgtacctgggccggatgttcagtgggacccccgtgatccgactgcgcttcaagaggctgcagcccaccaggtgaggaggtgtccacaggaggcaacacaacttagaatggccaagacactggcttcacagggcccgggccagggttcggccagcagggaggggccgggcatctgcctgtgcccagtgctgactcatttctcctgtgggtgcccaggctggtagctgagtttgacttccggacctttgaccccgagggcatcctcctctttgccggaggccaccaggacagcacctggatcgtgctggccctgagagccggccggctggagctgcagctgcgctacaacggtgtcggccgtgtcaccagcagcggcccggtcatcaaccatggcatgtggcagacagtgagtgtgcggcagccaccccttccaggcctcacggggttctccctgagccagactcagctgtcactcgcttatgcaaccgttaggagatgagctctggggcctgcatctgctgcgtgccggcaggacggggacccctgccccgtttagttcatgctccgggagacggggacccctgccccgtttagttcatgctccgggggacggggacccctgccccgtttagttcatgctccgggggacggggacccctgccccgtttagttcatgctccgggggacggggacccctgccccgtttagttcatgctccgggggacggggacccctgccccgtttagttcatgctccgggggacggggacccctgccccgtttagttcatgctccgggggacggggacccctgccccgtttagttcatgctccgggggacggggacccctgccccgtttagttcatgctccgggggacggggacccctgccccgtttagttcatgctccgggggacggggacccctgccccgtttagttcatgctccgggggacggggacccctgccccgtttagttcatgctctgggggctcactgtggtgctctaggcctctctgctatttcatcacgtttcagcctggctccctcagaaaggggccttgagtgcaacctgtcagtttggtctccctgagtttggtcaccctggctcaggtagaacccgtggttctcagccccaggggaccctgggctgtgtctggaggccatgctgtttatcccgagcagagtggggaacagaagccagggctgcttgacgctacacgcagggtgccccaccaggggaggaggccgccactgaacccgcaccacagcccagagctcccgccgtacgtgtctcccgggccgtggccaggccaggcgccgcccgcccacccttccctgtaggacggcgtggacgctgcggtccctgagccctggctcccagggcctgctggtcagtgcggccatgcatgccaagggtccaggtgacctcacgggagctgccccttgccagagacgtcctgaccacctggaccccagccccatgggcaacctgaggggtcctggtcagacctgcacttgggcagctgtgggcagcggtaaaacgtgcccaccccacatccccatccgtggagcgagagggcctgtaagcaaccaggctcccgcccacagcgctgggcctccctcaccatactgggcttgcagaaggaaacgttgggaagaaaggtggaaagcacgtcttgcccttcagaaacattgtagacttgtatttccatcctgcaaagcaatgcctcgctccatttttcccaacctcttaaaggagcagtatctccaagagcaggaggctgttctcagcaaagctacagaaagcaaaggaagcagaagcagtttcagggatggagccccggggaggagggccccagggcaggtggcctgaggcgaggtcgcctgggggagcggtgttgcaggggatggagccatggggaggaggggcccggggcaggtggcctgaggcgaggtcgcctggagggagtggtgttgcaggggatggagccatggggaggaggggcccggggcaggtggcctgaggcgaggtcgcctgggggagcggtgttgcaggggatggagccatggggaggaggggcccggggcaggtggcctgaggcgaggtcacctgggggagcggtgttgcaggggatggagccacggggaggaggggcccggggcaggtggcctgaggcgaggtcacctgggggagtggtgttgcaggggatggagccacggggaggaggggcccggggcaggtggcctgaggcgaggtcgcctgggggagcggtgttgcaggggatggagccacggggaggaggggcccagggcaggtggcctgaggcgaggtcacctgggggagcggtgttgcagtgtagtcccgcccagtgactcacagcggccgcagcaccccaccaagacaggcccttccccagcaggggtacctcatgaggacccctccccaattccaccctctctagctgctgcccaaacccagctgacccgaatttgtaccatgtttttgtgactcagttcaaacccaaatacctgaaaggtgttttcacacaggaagaaggatattcttctgaagctcaggaatatagtgtatctagcattagactttacaggttttctatgaggaaaggttttggtgaccacattgatgcatcgagggccctcctggcccagatgatgagcagggactctctgaggttgggaccctcttggctcaggtgtggatcaggtggtctccttgaggtcaggtccctcttggctcaggtgaggatcaggtggtctccctgagattgggaccttcttggctcaggtgtggatcagggggtctccctgagattgggaccctcttggctcaggtgaggatcaggtggtctccccgaggtcaggtccctcttggcccaggtgaggatcaggtggcctccctgagattgggaccctcttggcccaggtgaggatcaggtggactccctgaggtcaggtccctcttggcccaggtgaggatcaggtggactccctgaggtcaggtccctcttggcccaggtgaggatcagatggtctccttgagatcaggtccctcatggctcaggtgaggatcaggtggtctctctgaggttgggaccctcttggctcaggtgtggatcaggtggtctctctgaagttgggaccctcttggcccaggtgaggatcaggtggtctccccgggtcaggtccctcttggcccaggtgaggatcatgtggtctccctgagattgagaccctcttggcccaggtgaggatcaggtggtgtccctgagattgggaccttcttggctcaggtgtggatcaggtggtctccctgaggtcaggtccctcttggccaggtgaggatcaggtggtctccctgagattgggaccctcttcgcccaggtgaggatcaggtggcctccctgagattgggaccctcttggcccaggtgaggatcatgtggtctgcctgagattgagaccctcttggcccaggtgaggatcaggtggtctccctgagatcgggaccctcttggctcaggggaggatcaggtggtctccctgaggtcgggaccctcttggcccaggtgaggatcaggtggcctccctgagatcgggaccctcttggcccaggtgaggatcatgtggtctgcctgagattgagaccctcttggcccaggtgaggatcaggtggtctccctgagatcgggaccctcttggctcaggggaggatcaggtggtctccctgaggtcgggaccctcttggctcaggggaggatcaggtggtctccctgagatcgggaccctcttggctcaggggaggatcaggtggtctccctgaggttgggaccctcttggcccaggtgaggatcaggtggcctccccgaggtcgggaccctcttggctcaggagaggatgagtgtggtttttctcagttgggagccccttcagaacgtgcactcccatcttttctcatggcgctgcctctcttcagatctctgttgaggagctggcgcggaatctggtcatcaaggtcaacagggatgctgtcatgaaaatcgcggtggccggggacttgttccaaccggagcgaggactgtatcatctgaacctgaccgtgggaggtattcccttccatgagaaggacctcgtgcagcctgtgagtactgtacctgtccctgtgtagacgcgccgtgtgctgggatcccgggaacggtgtcaggaagcctcagtcacaccctgccctgtgtttaccattaaccaggtgtgaggaggacctagaggaaggaaaggtttcctagagtttgacaaagtcgccgtacagctatgtcattaattttaccatctctttttatgagacctaagttttcatctgaattgataataaagttgtctatttttcaatggagataagacacaattaaattattattattttttttgagacggagtcttgctctgttgcccaggctggagtgcagtggcgcgatctcggctcactgcaagctccgcctcccgggttcacgccattctcctgcctcagcctcccaggcagctgggactacaggcgcccgccaccacgtccggctaatttttttgtatttttagtagagacggggtttcgccgtggtctcgatcttctgacctcgtgaactgcccacctcggcctcccaaagtgctgggattacaggcgtgagccaccgcgcccggccgaaattattctttaacagaacagtaaacttttttggacaatttccaagaacattttgggttttgtaactctgccgtgagtctcataaggggaaaacagccatgatgggcggtcagtgtgggccattgctccaggtcccgccttctctccccttcagcacagcacacgcccgtgcccccgacctgtgtctccagcccccacgtgctgacgtctaagccgtcatcctgggtattttcacttccacaccaggcaggagaaaggcacgcatgtcttcgcgtctttgggtgctgagtgtcggcagtgcctgtgctgaagccaccccttcagtgttgtgaggggcacctgctccccaggcccacagactgcctggtgccgggaccttcggtgttgtgaggggcacctgcttcccaggcccacagacagcctggtgccgggactttgcctggctggaccctcctcgtttcacagataagggggttgccctgatttgcccacagccatattgaatattgaataattcacatgagtgttggatggttgaacaatccatactctttgaccttagacccacatggccttttcagtcctttcctagctttaaaatgaacctttagttcttgagcatacaccagtggaaataggtattctgcagtgaggcgttgtgtaaagtgaagaaaccttctgtgaaatggccaccaccgatgggactggcccgtttctgccgtagagctgcacataccagggccgcgaaggcgccacccaccgactggggcatccggcatggggcttctcgctcccaggaagccacggagatttctctgcctttccagataaaccctcgtctggatggctgcatgaggagctggaactggctgaacggagaagacaccaccatccaggaaacggtgaaagtgaacacgaggatgcagtgcttctcggtgacggagagaggctctttctaccccgggagcggcttcgccttctacagcctggactacagtaagtcttggctcttaccgttggggtggctgtggctgcaccttcagacaggcatacgctgaaagcaagcagacggcctcagatggcagcgtcaggacaagctgaggctcctccggttccggggcagggatgggtgggcggggtgggcggaggtgcgggcagaggcccacctctcaggatggccatgcaggtcactcagttcagagtcagccagtgaagaagaaatgagagagatgtgccgagaaggtgcctgcgaagccagtgccaggaggccggggagagaaggtgcctgcgaggccggcgccaggaggcgggggagagaaggtgcctgcgaggccggcgccaggaggccggggagagaaggtgcctgcgaggccggcgccgggaggccggggagagaaggtgcctgcgaggccagcgccgggaggccggggagagaaggtgcctgcgaggccggcgccgggaggccggggagagaaggtgcctgcgaggccggcgccgggaggccggggagagaaggtgcctgcgaggccggcgccgggaggctggggagagaaggtgcctgcgaggccagcgccgggaggccggggagagaaggtgcctgcgaggccggggaggctgggagccttacagggtcctttgcagaaagtccggagacagcacagccttaggactcgtccaggggcacagagaagctctcggtaacatggtggacaccgtggtcaccgatgacccggtgagacagctacaatgggaggtgtgtaaaaacagccgtgaagctgcctgggggacagtgaacctaggcctgaaaaagggaggacagggtggatgtgagctgctggcccagtcctgtgacgccacgctgccgccctccccagtgcaggctccgggggtgctgctgtgaggatagtgttactgctcggccccaccctgcctcacattcccaccccacgtgggccccactggggcaccacagccctgccctattcctggacaccgagccgtttatggtgaagcccccacacgcacagagggcaggcagcgccccctccgtcagatctcagggctgccggccctcaagcacccagcaggaaccccaggttcaaggggatccacgcggagcaaaggggagggtcctgccccgtcctgagccagatccagtgtcaccgtctccccccgggtgtcaaaagcgtgaccgtgtcaggaaaggcatctgagaaaagcgccatctgccactggctggactgactgtgcacacgcgttctccctcagtcttgatttttggacttccaaatctagagcatcataatgtttgacacgaaatcatgtcatatgaaatgcttaaatcctttttccacttaatatcatacacatttctcaggggtaaccttatgcaggcatcacaggggccatttccagtgactgccggccgcgtctgccggccctttttggtctatccggacagaagcagttacagctccatgcatttccagtgaatctcaaactataccagtaacgtctcttacaagacagaggagacttgctgggaatggtagtactggcctggctcactctgcagcgactctgctgggctcaggcttgcagatctccgggtctgtgcagcctccatgcaaggggccacgtggagccgggaaaccttcccggggagagcagaggccggtgcccttgtgaagccccgatggccaacatgtgcctagcctcctgtcaggagcttccttttttttttttttttttttttttgagacggagtttcgcctttgttgcccacactggagtacaatggcacgatcttggctccacctcccaggttcataccacaacctccgcctcccaggttcaagcgattctcctgcctcagcctcccgagtagatgggattacaggcatgcaccaccacacccagctaattttgcatttttagtagagatggggtttctccatgttggtcaggttggtctcgaactcccgaccttaggtgatccacccacctcagcctcccaaattgctaggattacaggcgtgagccaccacgcccgactgggagcttccattttaaagaacaccatcatctctcccttcacaggttatgggaagaccggcaaacaggagactttttgttgttactttttgattctgttgcaatatttttgttactttttctgattttgtgtgtttcggtgccataaatggttgttgagaactgatgtggcgggtaccagctagggacaggcaggacaggcgatgtgggtttcaggcgtacacagccccgtgggaaagagacagggaaaccagcacaattcactctgaccccaaccttggcctgcagtgcgaggcgcccagtcacaaatgtgtacacacagtgatttggggtcctttttcctaaaacagcttctttatcaggactttggaattctgggtgagatagaaacactgaaaacagggcggaagttttttcttctggcttcttagtccacggagggctcagcgtggagaggatatgccgtggcattctccctgggagaccacacatgttcccgacagctcagaccccagaccgcatgtgctcctgacagctcagaccccagaccgcgcgtgctcctgacagctcagaccccagaccgcaggtgctcccgacagctcagaccccagaccgcgggtgctcctgacagctcagaccccagaccgcgcgtgctcccgacagctcagaccccagaccgcgggtgctcctgacagctcagaccccagaccgcgcgtgctcccgacagctcagaccccagaccgcgggtgctcctgacagctcagaccccagaccacgcgtgctcccgacagctcagaccccagaccacggtgctcctgacagctcagaactcagaccgcgggtgctcctgacagctcagaccccagaccgcgcgtgctcctgacagctcagaccccagaccaccgtgctcatgacagctcctgtccgcatgctatcttaaactctcagcccccactgggccctgtgctgctacctgaaagctgcaggtgagatgcgaggcacgaggccacgcacgctctgaggaaggagctgtcaggcgctcctgaaacaagaggacatcggagggaggcagggacaggcctgcgtcccatggtgcacagcctgtggcccctcagacgggcctgtgtggcctggtggtcacctacagggcatttggaagtggggtactggtgtggccagggagaaacagcctgggggtccccggtgcctctgggctccgggccaagatctgaaccagtctgttgagttttccatcacgtcccagatccggggctgtctgcacagcttcccaccccggctgggactgcatctctcgaggccctgctccgacctcactgtggcctctccaccgtgcataccaccctataatgcaccgctttcattgcagtgcggacccctctggacgtcgggactgaatcaacctgggaagtagaagtcgtggctcacatccgcccagccgcagacacaggcgtgctgtttgcgctctgggcccccgacctccgtgccgtgcctctctctgtggcactggtagactatcactccacgaagaaactcaagaagcaggtagggcctccgccacccagggcgtcctgaccggctcgacccacgggtacgtgggctgcactccctggcaggggacgaagggggcccgcggtgggatccccagggacccccaaagcctctgaccagaggtctgatgagccaagcccggcgtgggccacgcttcgggctgcgggggttgtttggacaccaggtcaccgccacacagctgagggggccggcgcctgcgagccacactcggctcacagtgtgggagcttttcccctgttcggttgggcagatggtggctcacagcaatctgaattagtctctggtgtttaagtcagatgatttcagcaacaaactcagttttccaatttccctggaaaagtcggatctgtgaccttggccggtcccccaacagcgtctttccgtgggggacaccgggtggagctgagtgcagctgccccttggacaaggtccccccacccccggtcctcacaataagtcagctgtcctgggctgggggactcatgctgttttccccacagaacaatcaagaggtgacagaaacagcttttattctctcgctcgtgtgctaaggagggagacatgggtcaaaccagagaggctcacgttctccaagtctgcccaccccggggccacagagccctcccgcttgctgggatacgacagacaggcttggttcatgcaaatgctcgttaccagggccagacccaatctcagcatctggaataaacagctgctgttatgtagcaacagccgacccctgggctgctgggctgtggtgccagcgtgagtgcccaccgggctgggaggccgccaccgcagggctgggtcctgggtccccatcagggccaccccagttcctggtcaagtgcagcctcggtcttgtgtgtgcctggtgcctggggctggggttgaccctctcacacccaacctgggggccacacttgttcccccacagcctcccaggctggcccctggctttacgtgcagagaagctgagccccaggtggggtgggggtgtcatccacagtcagcgagcatccagacccagggctgcagggaaccctggacggagacaggcgtgcggcgtaggggtggccagcagctgtgaggaccagcttggacctaacagctcacgtaggggtggccggcaggccctgaccacacctcggtctcctgcagctggtggtcctggccgtggagcatacggccttggccctaatggagatcaaggtctgcgacggccaagagcacgtggtcaccgtctcgctgagggacggtgaggccaccctggaggtggacggcaccaggggccagagcgaggtgagcgccgcgcagctgcaggagaggctggccgtgctcgagaggcacctgcggagccccgtgctcacctttgctggcggcctgccaggtaggtgctccctgctccgctcaacccgggtgaagagctccagggaggcccagcttggtcaccccagatctaacctggacaggctggggtttctggtagtgaatgcggaagaggacttgtgttttaagaggaaggagaagtccaggtgggtcgttagtggctattatggtgtctcggtgctggtcaggtcattggctgagactgagaaacacgtacgggggccggcattggcctgagtcaggccccacgaacctgcatcttcagggagcattcgtccacacccatcagaccagccccgggggagagggctgggcagacctcgggccaggctgcagttgggacccgcggctgtcaccgcagctgttagcagcgaacagagtgaccgccagcccctcccatgtccagcagggcgtcctgccgtgtcccatgggctacacagcacagaggctgggaccggggatgtccttgccatgagctgggagggtcagcggaaaggcacgtgggagccggcaagtcctcggctgcccgcaggttttcacttgcggcaaacggcaggatttctctcttggctgccagacacagactccacttagttttaataaacagagctttgaagaggatgagagcgagccaggaggcctgcagcctgaatgactcactgggcacagaagaagatcacgtttaaccgatgggactgtctgtgctcccagcggggaagggagggctggcgtctgcagagcccaggctggcagatgcctcctgcttgtctgccgggtctgcggccaaacgaacggggaccgagaagttagagaagaaagggaaaccctgccctttcggagggaacccggggctggccacaagcgctgccgggggtgggggggccaggcggggccggccacgtggtgagctaagatatgttgttctctccctgcggcccagatgtgccggtgacttcagcgccagtcaccgcgttctaccgcggctgcatgacactggaggtcaaccggaggctgctggacctggacgaggcggcgtacaagcacagcgacatcacggcccactcctgcccccccgtggagcccgccgcagcctaggcccccacgggacgcggcaggcttctcagtctctgtccgagacagccgggaggagcctgggggctcctcaccacgtggggccatgctgagagctgggctttcctctgtgaccatcccggcctgtaacatatctgtaaatagtgagatggacttggggcctctgacgccgcgcactcagccgtgggcccgggcgcggggaggccggcgcagcgcagagcgggctcgaagaaaataattctctattatttttattaccaagcgcttctttctgactctaaaatatggaaaataaaatatttacagaaagctttgtaa

SEQ ID NO: 4 - DNA, 23252 bp, Homo sapiens
  misc_feature (1)..(23252): DNA nucleotide sequence of the entire HAPLN3 genomic locus including 5000-bp upstream sequence.
actgcggagctgggttccctgaggagctgcctgcctgtggacaccctcaggaccagtgtcagactgtgggcggcgccgcagggagcctctagagcagttcatgcccctccaggctgtggcctctcctgtccttcttcccatcacagtgcagtgcaggtctcaggcaggggtggttggcgtggagttggccagggcccagaccctatgagctttatagcagtgaggtaccgaacaccatgtgtggcaaagtaggtggtattatttatgccccctcaccgctttttttttttttttttctgagacagagccttgctctgtcacccaggctggagtgcagtggcgccatctcggctcaccgcaacctccgcctcccaggttcaagcggttcttctgactcagcctccctagtagctgggattacaggcagccaccatcatgcccagctaattttttgtatttttagtagagacggggtttcaccatgttggtcaggctggtctcgaactcctgacctcaggtgatccacctgcctcaagtctctcccaaagtgttgggattataggcatgagacaccatgtccggccttatgcccattttatagccaaagaaactgaggctcacccaagtagtttttttcaaaactagaattcatgcctcagtgtgtctgcctcttttcaccttactggagatggtccaagcagagaaaatgtggttggtttcttctgtaggtggacctgggctcctcgaaggaggtgacaggcatcatcacccagggggcccgtaactttggctctgtccagtttgtggcatcctacaaggttgcctacagtaatgacagtgcgaactggactgagtaccaggaccccaggactggcagcagtaaggtgggtgtctgtccagctgcccaccctttgccattccttcattacttccctgggagtctggcctggggctctgaggggaggggggctggctcggggtcctcctgacacccgctctgcctctagatcttccctggcaactgggacaaccactcccacaagaagaacttgtttgagacgcccatcctggctcgctatgtgcgcatcctgcctgtagcctggcacaaccgcatcgccctgcgcctggagctgctgggctgttagtggccacctgccacccccaggtcttcctgctttccatgggcccgctgcctcttggcttctcagcccctttaaatcaccatagggctggggactggggaaggggagggtgttcagaggcagcaccaccacacagtcacccctccctccctctttcccaccctccacctctcacgggccctgccccagcccctaagccccgtcccctaacccccagtcctcactgtcctgttttcttaggcactgagggatctgagtaggtctgggatggacaggaaagggcaaagtagggcgtgtggtttccctgcccctgtccggaccgccgatcccaggtgcgtgtgtctctgtctctcctagcccctctctcacacatcacattcccatggtggcctcaagaaaggcccggaagcgccaggctggagataacagcctcttgcccgtcggccctgcgtcggccctggggtaccatgtggccacaactgctgtggccccctgtccccaagacacttccccttgtctccctggttgcctctcttgccccttgtcctgaagcccagcgacacagaagggggtggggcgggtctatggggagaaagggagcgaggtcagaggagggcatgggttggcagggtgggcgtttggggccctctatgctggcttttcaccccagaggacacaggcagcttccaaaatatatttatcttcttcacgggaactcttggtgtggttcgttattgtttcatgggaatgggatttaaattgcgctggtttccccatcccccacctgtggtcctccctgagccccagcttgcttgcttgcttttttttttttttttttgagatggagtcttgctctgtcgccaggctggagtgcagtggtgtgatctcggctcattgcaatctctgcctcctgggttcaagcatttctcctacctcagcctcccaagtagctgggactataggtgcacaccaccatgcccagctaagttttatatttttagtagagacagggtttcaccgtgttggccaggattgtctcaatctcttgaccttgtgatccacctgcctcggcctcccaaagtgctgggattacaggcgtgagccaccgtgcccagccccatctttctttatgtcacctgcctgactacacatagcttcatagcaggaggctggagactttggtccagggcggcctgaaggaagtcaggacttccaggtcctcaaaacctgacttcccctcttccctctgctttctacctccatgccgtctggccctgagccctacaactgctgcctggtcaggggcccagcgagtgctggcagacactgtctcctgaatgcttttgctcccttcctgccaggaagactggctggggcagctggttttccccttcagcagtttccattctctctgcaactggagtggtgggctggagaaactataagaaactcagtgaacctggatgccttccgaactgcgggagttcctggggtgggtgcagcgtgggactggaggagggggccggggctctgccaagtgggcatgaggcctcctgcctgaacacactggttcctggtaggccactggcgtgtgtgctccagggataccctctctgccctcccctgtgtgggggtcatcaagaagtgggggtgggccttgcgggccagtgtcttggtgatctggaagggtgacttgcaggcagaggcttggctagcttgggaaggggtgtaggaaaaaccaccctctttgtcaaggtgaatttttccaaactttgggagccggctgtgttctgcaggcagggggtgcatctgagcagcaggaggtggggccgcctctgagcagcaggaggtggggccgcctctgagcagcaggaggtggggccacagggctgccaaagggagggcgtggctttgctggaaccacatcagggaaatgtgtctggaagtggttcctttctgagacctgcggttgctgggctcctgggcctagcagggtctgaataaaaggcccaggccgtggtcttcgtaggaactgaggatgggggactcccttcccctgggtgtcccttggcctactgcctcccgtttcagagctctcttctgcggagcggtgtggattgggtttagagccaagcctttctgcgtgcttccaagcctcaggtctccctcccgggggagtttcctgccctgaacccctgttccagcataccctggggataagcagacagtgggagaagcatctctgctctgggatgggttggccacagccttctaaaagtccccctcctgggaccctggagtggagtcccctcactcctgaccccctccttccttccttggcttctctccctcagcagtgtcttccatttgcccagcttttaccatcacccctacacattgacttttttctgccccactgcaaggcagagggtgagcgttcagattccacctgctggctacccctacccctggctggcatgttcaactcgacttaactgtagcaaaatgtgctctccctactgtccatcctctcccctgtcgggaacctgcagagggacctaccttggctcccctttgcccatcaagcctggcgttccttttaggtgtagtttacctgttgatcacagttctttgtgctccaatgtgcccctggctgtgtgtaacacacacacatgcacacacacacacacactcatgggccaacttgagctgtgtttaggaagaggctctgagctctgtgaccctgtgacccttcgacccttcccccagccaaagctgaaggacctccttagtcttttctgctgaggaaacatcgggctgtccaggccagggcccccattggtctggacaggaaagaaaacaccctgtccaaacagaggcatcctgagcggctgcctggatggctgtgctgattagcaggattccgaagggaggcccacccctgttggaggaccactcagaagcctgattgcccctgcaggctgcagaggtatcccaccctgtgtctcccctcccagccagggccactcattcaagccccatgtgctggggatagcacctgctatgtgcctgacagtgagttgggaatctggccagtgtttcatgatggccaaactcaggggcatgaggacatcagcaaccccttgctttttttttttttttttttttgagacggagttttgctcttgttgcccaggctggagcacaatggcatgatctcagctcactgcaacctccgcctcctgggttcaagcaattctcctgcctcagcctcccaagtagctgggattacaggcatgctccaccacgcccagctaattttgtatttttagtagggacagggtttcaccatgttgcccaggctggtcttgaactcctgacctcaggtgatccaccggcctccacctcccaaagtgctggggttacaagcatgagccactcactgcacctggcctcacccccttgctttctatttggaaaagaaagtaatacagaagtctcaccccttccacaatcaaaggtggggagcagccttagcccctagcagaatgctggacaggggcttcccctgcttactcccactgtttttggtataccaggctttctaaggggatcccccctccccaaactctcctattccacccctactctcctttcccaagacgtgagggcctcaactcttgcacaccctctttgcggtggttcccagcgagtctggagaccgctcaagcctgcagcagctcctcccttcgagcccagcccttgggagggaaaggtgcgcgtgttcctttaaggggctggtctggcgggagcgcgggggtttttctgctgccgcttcctttctgcccttttaatttccccgaaatcagactgctgccttggaccgggacagctcgcggcccccgagagctctagccgtcgaggagctgcctggggacggtacgtggcttaggggtcgctgggcttctggggctgtgtgcgggccgggttcctcccttaccgctttgggtgccctgcgggtccccacacctcccgggcagggtccggggaaggggcaggaggcgtgggccgggcactgcggaggcccgggctgagatgggctgtgatcgcgggcgaggggcgcccggggcacaagtggggagggagcggcgcggggatgcgggcgccggaccctcgtgcccaccgtgagggagcagagcccgagcggaccccgtggcctccgagaccaccgtccgcctccagcccccttcctgccagggtccgcttggctctctcccctgtcgtctgtccagggtcggctgcctccagtgccgtccgcggcgccccaggccctgcccctgggtatctgttggatgctccgggggccccgggagtcctgggaggggctgagggcaacctgcgaggcggctggcggacctgcgcctctggaccgcagctggccggctctgggcgcctggggcaaaggcaactgatgcctatgggttccagacctcgctcaccggggttcttgccccagggacagcgaggccagaagggtagggagggtggagggcagagccctgggtgggagatggcgaccctcagggagaaacgtaggcttgtgcgcagccagtatggaaacagcacggcacttggacccagtcctgccaccagctcgttggcagccacaggccacaggcagcctgtaaacctgttgggaccttggtgtccagcgctgacccgcgggagtgcctgtgctccctggagtagggggcagcgattgagaggggccctggcttctctccctcgacgccgcccgggccagcggattgggaaacacctccggttttcattctcctgggggctgcaggtttcaaaggcggagatcaagccttgtgcaaacagggacagggatgtcaaatttctcgctgggagcagcgctcgtgcagacctcgcgggcgatgctgcctcctgctggtacctgggggacttgtactcacggaaggcccagtgcggacatgcacctggcagggaggtggcacctaccctccctccaagcccaggcttattgttcttgggtggaggggtccctaggctggggcgcctgggaaaagcaaagggctggtcatcaggaaacctgaactttctctaagttcgagatatttgacaaagataacgccttgggtagttcactgacctccactctcttggcctcagtttcctcaactgtgaagaggaggcagtggtgaccactttgtctcgtaggcagtgagagaggagaaagagccactgagatggtgtaagacttcactgtgtgaactgctcaccagagtagtaacaggtcatattttcccagtgcttgctccttatcaagcatcaagcagtattttcagtgctctgcagctattctctcccttaatcttcacgagagtgttttctgtttggtattgtcgtgaccgccccccccaccccaactttttttttttttttgagatggagtctcactcttcttgcccagactggagtgcaatggctcaatctcggctcactgcaacctccgcctcctgggttcaagcgattcttctgcttcagcctcccgagtagctgggactacaagcgctcatcaccacactcggctaatttttgtatttttagtagagatggggtttcaccgtgttggccaggctagtcttgaactcttgacctcaggtgatctgcccacctcagcctcccaaagtgcagggataacaggcatgaggcactgtgcctggcttgtgacccccattttaaagatgaagaaactgaggctcagagaggtgcagcgacttgtccaatgacagagggttagtaagtgggtggagccagaactgaatgcaggcagccaatctgcttctagagcctgaaatctttgccatgttcatttgttgagcacctgctgcatgccagggaccagacatcatacatcttctataattgtcaccacagcccattttttttttttgagctggagtcttgctctgtcggccagtctggagtgcagtggtgtggtcttggctcactgcaacttccgcctcctgggttcaaacaattctcctgccttagccaccccagtagctgggattacaggcatctgccaccacacccagctaaattttgtattttcattagagatgggggtttcactgtgttggccaggccagtctcgaactcctgacctcaggtgatccaccccctcagcttccccaaatgctgtaggattacaggtgtgagccactgcacccggccttaagttccttttttttacagatgaggaaatggaggcacagagaggtgaacttgcccgaagtcactcagcaggatgcagtgtgtccagctccaataccgagcccaggtctgagtgcccagacaggactccagaagatttggggaactatccactgccaaggtgactgggctggacttggtcttgggccttccagctggtggcacctctgtggtggtcctgaggagttggtggctggatagccatggtaggggagcagaggctacccatccctcccctcagtggtagtggtcagggatggtcagagatggacctgaggcaaggcagcaaccaagtggcaattgccactcctgactcccacacaggactctgtcctgtgcactgaccttagcattcaaggctgtgcttgtcctcagcccccgagttcccctttagtcttctctggagagaggaaattttctgttcagagaggtcaaatgactttcccagggtcacccagctagcaggtggcagagccaagacccaacctcaatgagtttaacttgaaaccttgggcctgtgtgctgctcctctctcagagaggcctggaaaatggccagcttcctcctggccttttgttcttgggcacagggctgatcttttcttataattccttttgtttttcttttcttttttttttgagatgcagtttcactctgtcgcccaggctggagtgcaaaggtgtgatctcggctcactgcaacctctgcctcccaggttcaagcaattctcctgcctcagcctctggagtagctgggattacaggcacccaccaccacacccatctattttttatatttttagtagagacggggttttaccatgttggccaagctggtctcaaactcctgacctcaggtgatctaccctccttggcctccaaagtgctgggataacaggtgtaagccactgtgcccagctaattccttttgattttcttggcatccccctcaatgtgaggttacattactgctgagttagcatccaacaaagaggtgttactgatgtcacttagtggcagaaacgcctgcatttgtttacccttaggaagccctttctcactagggagcatttgtgctagatgagccgctgtaagaggctggaaacattataagcagcagctgggagcccctctgctcaaggagactctaggtgcccagggacagcggggagcccaggacatcaagctcaacatcaaatcttggccccacttccctcctggttccaggtgtggagcctgaaggaaggcagaggaaacgaactcttacaagggtttgctctgggccactgggctgtgtgtgccacacaatcacctccctgaatttggcatggttccaggctttggggctggagtgggttcgaatcctagctctgccacttcctagctggatgaccttgggcatatgacttagtctctctgtgccttggtttttccatctgcaaaatgggaacactactaggctcacatgtcagggtagtggtaaggattacatgagagataccaggtgtggtggctcatgcctgtaataccagcactttgggaggcggaggcgggcagaacaattaagcccaggagtttgagaccagcctgggcaacatggtgaaaccccatctctactagaaatacaaagaattagctgggtgtggtggcacacacctgtaatcccagctacttgggaggctgaggcaggagattcatttgaacccaggaggcagaggttgctatgagccgagatcttaccactgcactccagcctgggcgacagagtgagacttggcctcaaaacaaaaacaaaaataaaataaatgagagagtaagtgctcagctgttaatacttttatactgatcatagtaatgctgtggtgtgtgtatttgttaggacaagtgaggctaagctgtgttgacaaagagatgcaggccgggtgcagtggctcacgcctgtaatcccagcactttgggaggccgaggtgggcagatcacctgaggtcaggagttcaagactagcttggccaacatggcgaaaccccgtctctactaaaaaattacaaaaattagcctggtgtggtggcaggtgcctgtaatctcagctactcaggaggctgaggcaggaagaattgcttgaatctgggagcagaagttgcagtgagccgagattgcaccattgcactccagcctgggcgacagagtgagacttagtctcaaaaaaaaaaagatgcaaaaaagtggtggcttaaatatgataggactctgtttctctctcataggacagtgcaagtggaggaggtccagggctgatgggcagctctgccattcaatctgtggtttccatctctgactctaagctggatactgtggtttccagaaggttgggggaaggaataccagggaaaggcatctgtaattgttttaactgccagacctggatgtggcatgttatttctgcttgctgccattgatgagaactgagtcacatagctctcctagctgcgagggaggctggaaatgcagtcttcagctgaacggtcgtgcacccatctagacctctgttactttaggagaaaactagaatgcattggcgagaaatataccagggtgagttttatgatctccatttcgcaaccgaggaaacttgcccagaatctcgcagtgaataaatagtagaggtgggatttgaactctgatcttccagttcccaaactctgtaccaggttgccccattgtgcttaggcctcccagttctccatcaccaagggggcttacaggaatcaacaggggaatgaattcctcttggacaagaagtggggtttcagagttggtagtgtcctggctgcagtgcacagcacagatggcaggtctgggccttgggatttctgtggtgtctaagggaatggtggatttggcctctcaactttctttacatccattctctccagcaagagctcctaactgttctggaaacaagaatgtttcctccacaatcccatcactctaacaagccaatgctgtgtgtgtctgcctgcctcctttcctccctccttccctttccttccttccttcctttccttccttcctccccttcctccctccctccctccctccctcccttccttctttccttccttcctttctcccttctgtcctccctcccttcctctttaagtgtttcctcatcttctgggtcctgtacacaggcattcacaagaccacatggttgcaatcatagcagaggcaattgtatgttctgctttgtctattttaacttacaccctaagcattcttccacgttgctacatgataatcatagttatgtttgcagctgcctgctgtcattctggtcttgctgcccccaggtctaccttccactcagcccctgcagggaagtgtcttaagatgtgagtctgatcctgtgacttctctgcttaaagccatcactggcctccaggacaaaggatagacttctggccaggtgtggtggctcatgcctgtaatcccagcactttgggaggccgaggtgggcggatcactcgaggcgaggagttcgagaccagcctggctaacatggtgaaaccccgtctctacaaaaaatacaaaaattaatggggcatgttggcgcatgcctgtaatcccagctactcgggaggctgaggcatgagaatcacttgaacccaggagacggaggttgcagtgagctcagatcttgccacggcactccagcttggacaacagagtgagattctatctttaaaaaaaaacaaaacaggatatgcttctgggcctgacacccaaggcatccagacgctggccctggtgacccccttacctcctctcccccatgcagccagggtcttggcaggaagcagaattcagcccagatgattccaataaagagactttaatggaggaatgacttctagagagtagggtgaggggacccaacaaggaagtgggggacgcagaggccagcagcagcagcagacactctatggcagaggcactggggtggcaagggagctgggaagcaatgccccgtcttcctcctcttccctctctgccatcttctctgagtgcctcccattggctcaatcccactggaagccagaaggcctggggaactgggacaacagggaccaatacgtgtcagagaaggacagacgatggacctggtgggtgtgtggggcaaatggaggacctcctgtatacccccagcacccccaggcttgggactcttgctggcatctgcacctttgtagtggcagtgccctactggataaacctgtcagtccttctccacctggcaaactcctgcatcttcagtctcatttggacattcccgtttctgtacctccatcgtggtactcaacacacagcaatcaagactgcctgcccacgactctgccccctccctggaccaagctccttcaaggagtgaccccatcttttaattgttgagagcacgcagtaaatggcaggtgagcagggctagggtgacatgagtgaggcagtagcccttggtgtgagatttaagcgggggaggaagggagtttgctagaaatcttagtaatcaagacaaaatatttgaatacaatatttaaaaaaaaatcaaatcatcaaactacagcccatgggttggctacctcttttgagcgcccacccaaactggaatagctcccaagacctctagcatggtgttcaaaaattatttttgagttgggcgcagtggcttatgcctgtaatctcagcactttgggaggccgaggcgggctgatcactaggtcaggagattgagatcatcctggctaacgcggtgaaaccccgtctgtactaaaattacaaaaaattagctgagcttggtggcacgcacctgtagtcccagctactcgggaggctgaggcaggagaatttcttgaacccaggaggcggaggttgcagtgagcaacctccactccagcctgggcgacagagcgagactctgtctcaaaaaaaaaaaaaaagggttcacaatgcaggactcatctttacttaacataccctctattcaccctgatattttctattctagtctagtttatttggcgtcattaaaaagtgctgctcatacctttcttttcttttctttcttttttcttttttttgagatagagtttcactcttgttgcccaggctggagtgcaatggcatgatcttggctcaccacaacctctgcctcctgggttcaagcgattctcctgcctcagcctcccgagtagctgggattacagacatgtgacaccatgcctggctaattttgtatttttagtagagacggggtttctccatgttggccaggctggcctcaaactcccaacctcaggtgatccgcccgcctcagcctcccaaagtcctgggattataagcgtgagccaccatgcccagcctgcccataacctttcaaattctggcttgaaaaacattgagcctgtcatatcatcctgcttaattttctctgcttttagctgcctgatacttccttcttatgatttgtctctttgctgatctcccgtcttgccttcggggtacagctccctgaaagcaggaaccccatctagcttgtcactgctgtcttctcagctccgggaacagcgtctggcacgtaggcggcaggtgtcccgcagtgagctgttgagcaagcgagtgagtggtgttggagcagaggggatgtgggccctggaagccaggcttttctaattgccttgttttcctccccttcccagtttgccctggggccccagcctggcccgggtcaccctggcatgaggagatgggcctgttgctcctggtcccgttgctcctgctgcccggctcctacggactgcccttctacaacggcttctactactccaacagcgccaacgaccagaacctaggcaacggtcatggcaaaggtaggcgacctcctgcacccggctctttgctcccctgggtgacctagacctccttggctcttgctgtgatctgagggttccaggctgggacagggacagcagccctgttccagcagggcccttgtagtgggccagcttgcttctcagacaggggaaggggtgagttcattttcctgtgttcgccagccccttcgtcatggggcccaattcacttaggctttttactttccctaaaagtcttgccagttgttcaaggtccagcttgaatgtgtcctcccctggtccccccagtggaaaggggacctggggtcgaatagatgtgagtttgaatgttttttttgtttgtttttgagataaagtctcactctgttgccgaggctggagtgcaatggcacgatctcggctcactgcaacctctgcctcccgggttcaagcgattctcctgcctcggcctcccgagtagctgggattacaagcatgtgccaccatgcctggctactttttgtatttttagtagagaaggggtttcaccatgttggccaggctggtcttgaactcctgacctcaggtgatccacctgcctcgacctcccaaattgctgggattacaggcataagccaccatgcctggcccgagtttgaatcttataattctacctcttactagctgtgtggccttgggcagggaacgttttaaagtagcagttattgtgcacccaacatgggttgggcgcgcttctagatattttgcatatgtcgtctcctgtaatcacaaaagccctgatgtaggcaagggtgaaaatatacctttttttttttttttttaagatggagtctcactttgttgtccaggctggagtgcagtggcgcgatcttggctcactgcagcctctgcctcccaggttcaagcgattctcctgcctcagcctcccaagcagctgggattacaggcatctgccaccacacctggctaatttttgtacttttagtagaaatgggggtttctccatgttggccaggctggtcctgaactcttgacctcaggtgatccacccgcctcagcctcccaaaatgctgggattacaggcgtgagccaacgagccttgccgaaaatacacatttttaaccattagtgcagcacgggtgctgaccaggctgaattgatgctgtctgccctcacagcctgaaagtagattctattatcatcccttctcatagatgagcaaactaggctcagagagttgatccagttgtccaggtcaaacagctattaaaaagacaaagctgagggctgggtgcagtggctcatgcctataatcccagcactttgggagactgaggtgagtggatcacttgaggtcaggagttcaaggccagcctggccaacataccgaaaccctctactaaagatacaaaaaattggccaggcgcggtgactcacacctgtaatcccagcacttaaggaggccgaggtggatggatcacgaggtcaagagatcaagaccattctgaccaacctggtgaaatcctgtctctactaaaaatacaaaagtagccgggcgtggtggcaggtgcctttaatcccagcttctcaggaggctgaggcaggagaattgcttgaacctgggaggcagaggttgcagtgagctgagatcataccactgcactccagcctgaacgacaaagtgagactccgtctcaaaaaaaaaaaaaaaaacacaaaaaacaaaaaattagccgggtgtggtggcgtgcacctgtaatcccagctactcaggaggctgaggcatgagaattgcttgaacctgggaggaggaggttgcagtaagctgagatcacaccactgcactccagcctgggtgacagagtgagactctgcctcaaaaacaacaacaacaaacttgttccacttgtttgtggaaggaacgaaccagatggctggtctcagtaatagccagcacctgccatgaagagcgcacagcctggttcagagacgacacatgagcctgcaagtgcagtgctgggtgtttctcacctttccctctgcctttgagtagatgattgtgcctgcagaggcattttccctcttttgattagtctcctaggtcagctgtaacaaattaacacaaacttggtggcttgaaacaacagaaatgtattctctcactgctttaggcaccagaaatccaaaattagtttcactgtgcagaaatcgaggtgcggataggactgtacctcctgtggctcttggggagaatctgttcttgccttgcctcttccggttctggtggctgctggcattccttggctgtagctgcctcactgcaggctctgcctccttggtcacgtggtcttctcctcttttatatgcaaatctccctctgcctccctctaaacaggtacttgcgcatttgcatttagggcccacctgggaaattcaggataccctccccatctcgacatccttagtttaacctcatctgcaaagtccattttgctacataattaggatttagggtattttgggaggccattatttagcccaccacacccttttccttcagaatttattttgttatacaagccctactttatttatttatttatttattgagacagagtctcgctctgtcacctgggctggagtgcagtggcgcgatctcggctcactgcaagctctgcctcctgggttcacgccattctcctgcctcagcctcccgagtagctgggactacaggcatccgacaccatgcctggctaattttttgtatttttagtggagatggggtttcaccgtgttagccaggatggtctcgatctcctgaccgcctgatccgcccgccttggcctcccaaagtgctgggattacaggcgtgagccaccgtgcccggcctacaagcactactttaatgagatttgcggaatttaaaaaacttaaacttcctactcatagtttcactacactaccaggccaacatttcatttttgtctttcccttttgtccctgaatatgtaagcaaagtcatatataatccccccacccaggggaaccactgttaactttttaggtatctctttctagccttttcttttttttttttttgagacagggtctcactctgtcacaccagtgcagtggtgtgatctcggctcactgcaacttctgcctcctgggctcaagagatccttccactttagcctcctgagttagctgagactacaggcgtgcaccactgtgcccagctaatttttgtatttttagtagagatggggcttcaccgtgttggccacgctagtctcgaactcgtggcctcaagtgatctgcccgccttggcctcccaaagtgctaggattacaggcgtgagccactgcacctagctgagccattcttttatgatttagaaaactttctccaacaaaaaccagctcatgtcatacatgtgatttttgtattctcccttatcacctcatagaatagaactcgttttctaagtcaatgattgaatgtacatctaccagattattttacatggctgtatagtattttatcatatggatgtacattttcattttattcaggttaaagcttcaaaggtagtttacttaagagagttgggaagaaccaaggaagtggcccctaaatgatagccctgcttcatatttattggacactttctgtgtgccaggcatcctgccttacctgatttgaaccttaccacagccctctgtagggactgtaattaacccattctacaaatggggaagctgagtcttgacttccctggattacacagctgggaaaaggtggaaccaagggcaagcccgaattgcctgactccaaacctctgtacctactgcctctgcagagcaggacagctctaatctgaatgagcctgaaagtcccctggaggctggaccccattcccagagtctctgaggcactgggaccccacaatgtgcatttctgacaaattcctggtgatgctaatgctgctggcccgagggccacacttggagacttctgcatatggcaatctgctacattaggtatagctcttttttagcacgattcctctacagggaacctccctgtctgtctcctgcttacccatgaggctgtccccttgcctccacctttttaattaattaatttgtttttattttgtttttggcaacagagtcttgctctctcacccagtttggaatgcagtggtgcgatcatgactcactgcagccttgacttctgggctgaaacaatactcccacctcagcctcccgagtagctgggaccacaagcatctaccaccatactcagctagttttaaaaatttttttgtagagacagggtctcactttattgcccaggctggtctcaaactcctgggctgaagcgatcctcctgtcctggcctctcaaagtgttgggattataagcgtgaaccaccgtgcctggcccctgtccccaccttgagtaaatcaagcatgtcttgaagtctagacccaagagaatgaatcagtgaggtcccaacaggggctcccaagttaaagatgaggcagccttagcctatgaacttgattcttttgttgcatgttgagttctgtgtgtatttgtaactctgagccgtgagcgtagtctcctttagaagttctgcccttagctcagtaggctgctccgtatttgggaagagttatggtggacagctggaccagagagtaaagccagggctgtgctgtcctctggccagtgtggtggggaaggaaactccgacggatccctatcagggccacttgtcctggccatgtacctcatgtggggtggctcttgttgcctgctccattggttagattttatgcatagcaaaccacccaaaacttagtgacttctttaggatgacagccatttgtttagctcatgattctgtgggtcagcattttggagtgggctccatttcttcaggtcttgcggttgggtcttgcagatgtgcctgcccatggtgggcaggtcagctgggggctggttgctgtaggatggcctcagctggggcgccctgtctctgttctgtgtattctctcatcctctagcaggcaagcctggccatgtgctcatggtggctggcaaagtcctaaaaaaagagtggaagcagcaaggccccctgggacctatgctcagagcaggcatgatggataacagtcacttccaaggcattcagttggtcaagcaagtggcaaggccagcacagattcaagggggtgggggaataactgtcatctcttgatggaaggagatgcaaagtcacattgcagagcatgtggatacagggaggggtggagcatggtggccatttttgcaatctgagcctgtaggagccgtggatgagggtgtgcggtggcccttgcaggggtacagatgtgcttcagcaggtctcatctgcaccctgtctctcccccaagacctccttaatggagtgaagctggtggtggagacacccgaggagaccctgttcacctaccaaggggccagtgtgatcctgccctgccgctaccgctacgagccggccctggtctccccgcggcgtgtgcgtgtcaaatggtggaagctgtcggagaacggggccccagagaaggacgtgctggtggccatcgggctgaggcaccgctcctttggggactaccaaggccgcgtgcacctgcggcaggacaaagagcatgacgtctcgctggagatccaggatctgcggctggaggactatgggcgttaccgctgtgaggtcattgacgggctggaggatgaaagcggtctggtggagctggagctgcggggtgagatgctaacggggactgggtgacactgggacctgagagcagaggggagaggaccagagaaaacatccagacctctgtgctttagacatttaaaagtacttaattctcaaaacaacccacatggaagctactgttgtgacccccattttacaggtgagaaaactgaggcacagagaggtcaagtaacttacctaaggtcacacagcttgtaaacgacagagctggggtctgaacccaagcacccagcctctagaatctgttcccctctacccgctgtaattcacatctcattcagagagaggaaaaccagagctggtcccacagcttattagagacagagctgagatttaagcaaggttagcgggtaacacaagcgaatgaggcagcccactgtgagacgatgggagtggtggggactgggcacactcctgagcccttgtcctgtgcccagggagctcccacactactcaggcccagctgatgatgccacgccagaatgcagaccccactgccaaattttctggcttgacaagataagcttatatttttatgtgagatctcctgatttttatgtaaaaacctcctttttaaaaacaaaacaaaacaaaaaacaaacaaaaagcccccccaaaaccaaaaacaaaaacccagtgctgtccaaaccagccacaccctgcaagccggatcttgtatgtggggtccctgtttgatctttaatttgtatttaccttctctgtctctaggatggggctgtgtgtcctcacatctctcccacatgttagggaggcagttcggggatagaggaaggtgacctgactttagccccagcccgtcccagctatgacatgtgggtaaatgcctcatcccccttagagccctgggcctctcaggtgtaaaatggggtatcacaatctttcctcctttacctccctcagaggcaatgaggataagatgtatgtccttaaaatgcgttctctgtctttgccaccagtgtccacatggcttacatggtggctcagaggggccgcattcctcattcttgaagttggggtggcagtggagttggggagaacctgcaagagtcattggtctggggtctgcaggggcagcctagagaaacagggagccctcaccccattcccggggcttcaagggctaggaatttggggtggaaccaggcatgaaatagtccccctgcaaacacacgtagaggctgcaagctgactgtcagggcccatgggcttctctgccgcccaacctggctttgcccaggtgcctggcttccggccctggtgagatcggaggtttggggctcaggctgttcctgggtccttggccacacggaggagattccaaagtgtccttcccagacccctagggtcacctccactccctaaggtttcattgacttggtagagactacatctcagaagtttaaaaactttttattagagtaaaatttcaaacacgaacatatcttttcagggcctgtggcctctatcagaccctgaccacaaggagagaaaccgcctgccccagacctccctgcccttgagcctcctttatggaaggcccttccccaaccctctccccacggcctctagggcctctccttctcctgaaaatcatctgccacacgtggaaagttccttgcattttcctaggaaatttccacattcataataacgtagacgatcgggtcccagctaacgagtggggagctgggagtcaaacctggcccctagagcccaaagcccgggcctgtctggagaagatggcacagcctcactgggggtctggcgacagccttgcggattaggttggggacattgttggggacattaatggactaattaattaccttaactcatggatgttttctgagtactgctgtgaaccagctgagtcccaggagagaggcggcaacggacaggaggtcagaggtttgctgagtttttctgagggatggtgtatgtgtgtgtgttgcaggcagcacatgtcccagtgaaggtgggaggagagcggggtgtccagccagctgggcccctggccaccccctaagctcctctttccttcccctgcaggtgtggtctttccttaccagtcccccaacgggcgctaccagttcaacttccacgagggccagcaggtctgtgcagagcaggctgcggtggtggcctcctttgagcagctcttccgggcctgggaggagggcctggactggtgcaacgcgggctggctgcaggatgccacggtgcagtaccccatcatgttgccccggcagccctgcggtggcccgggcctggcacctggcgtgcgaagctacggcccccgccaccgccgcctgcaccgctatgatgtattctgcttcgctactgccctcaagggtgagtggaatagccaagcgcgggcctgtgggtttggtggccacctgggacctgtgagagggcagcttctggggagctctggccccctctgctggctctgctggtactgccacctggaggccaagagcaccagccaccctagaagcagcatctggttgagttttgagtgctttgctgctgctgcgttatgcagggcataaatcattggtttcttcattcatcaaatgtttactgagtgcctaccatatgctggggcctagactaggctctcgggaatcacagacgaataaaacacagcctgtcttcacaaagcagctcatttcgtaggaagatgaacaagtaaaaacagaaactggttcagtgtcatatgccaagcccttggaaaagtgtctgacacatagtaggtgttcagtaaatgaccgaatgggcaagagactctgactggtccagcctaggtggggtgcccacccacctaaatagggaagggtggtgggggagtgcagacatgtctggagggacctgggttctatggcaggtgggacagagctctctgggacagggtgaagattagaaagtgttctctgcagatgcctgcagtatggtagctccctgggctcagacgggtctttggggctggcatctctgcagaccccgctgtgctctctggctgccccctgcgctgtacggcactcacgccccctttcccccagggcgggtgtactacctggagcaccctgagaagctgacgctgacagaggcaagggaggcctgccaggaagatgatgccacgatcgccaaggtgggacagctctttgccgcctggaagttccatggcctggaccgctgcgacgctggctggctggcagatggtagcgtccgctaccctgtggttcacccgcatcctaactgtgggcccccagagcctggggtccgaagctttggcttccccgacccgcagagccgcttgtacggtgtttactgctaccgccagcactaggacctggggccctcccctgccgcattccctcactggctgtgtatttattgagtggttcgttttcccttgtgggttggagccattttaactgtttttatacttctcaatttaaattttctttaaacatttttttactattttttgtaaagcaaacagaacccaatgcctccctttgctcctggatgccccactccaggaatcatgcttgctcccctgggccatttgcggttttgtgggcttctggagggttccccgccatccaggctggtctccctcccttaaggaggttggtgcccagagtgggcggtggcctgtctagaatgccgccgggagtccgggcatggtgggcacagttctccctgcccctcagcctgggggaagaagagggcctcgggggcctccggagctgggctttgggcctctcctgcccacctctacttctctgtgaagccgctgaccccagtctgcccactgaggggctagggctggaagccagttctaggcttccaggcgaaagctgagggaaggaagaaactcccctccccgttccccttcccctctcggttccaaagaatctgttttgttgtcatttgtttctcctgtttccctgtgtggggaggggccctcaggtgtgtgtactttggacaataaatggtgctatgactgccttccgccatcccca

SEQ ID NO: 5 - DNA, 1122510 bp, Homo sapiens
  misc_feature (1)..(112510): DNA nucleotide sequence of the entire ST6GALNAC3 genomic locus including 5000-bp upstream sequence.
atcatagctctctccagagggtttgtgagggctagaccattagaggaaaaaaatggttcaggcaaaataaactgcagcagaaccccaactgttaggccctctcccctgggtgttcccatcagtcctgcatggatgcatttcaaataccaactttccattctaatcttttagggcagcatgtaaccaggcctcactgagaggagaaatccaagaagagtgtagagaaacacacatgagaggaacctcacaataaaaaggaaacaaactctgggaaacatggttaagaaatatcagactcaattaataatggaggcttcaacagccttggagagatccaatacaaactaaattcaaactatatgccagtgcttctagccatatttactttttttttctttttttttttttgagatgaagtctagctctgtcactcaggctggagtgcaggggcacgatgttggctcactgcaatctctgcctcccaggttcaagcaattcttttgcctcagcctcccaagtagctgagactacaggtgtgcgccaccacacccgactaatttttgtatttttagtagagacggggcttcaccatgttggccaggctggtcttgaactcctgacctcaggtgatatgcctgcctgggcctcccaaagttctgggattatagacgtgagacacagtgcccagtccatatttacttttaattgattatgtttttttttttaaaaaaaaacttagaggaaaactctttaagaaaaacaaatcaggctaaaaactacattcttctaggtaatgaaaagtaggcaaacaacattagttttggattttttaaaaattaaaaacagcttttcttaattggttcatttgaaaaaaaatggaaacttccaatagggaaaggtagagctgagatgaagttaagggagaatgttactgaatgggaaaatatataatattttaaaaatgcaattttaaatcatgcgtaacttgtcttggagttcatcccagataagtatcagtatagtcagggatgttgacgaattctggattagaagaactgtgcaaaggtttgaaatagcagtaagctcaagtcttgggaatgcaaactggatgacattttggaatgtcctactatcgaaaaggagagaaatgaagcttaaccccatatgtcagtgtattctcataaacagctacctaaaagggcatagccaagatgcagttaaacatagctacagacacacgtgtggacctggacagctagatgcctgctttaggatatgaaaaatttcctaggtcacaattataacagtgcaatgatttctagaaaaagaagatcatttcctatcctggctcagaatgttaaaaaaaatgactttcccataacattttctaatggatcttccagtcacagtctcctatggaggcataatttatgtagtggatgacaaagagttttatgatatctggaattcatttaaaatctttagattggaaaaattgagatccaattaaaatcttaataaatgactctgtgttgcatataaatatattaaattaatatgtgtgcaggctgaaattggaaaagttatgagagtcagcatgttaattctatttctatcagggaactaactgtatgttataactctgagaattattgggtaatggggctgtttacaatgaggcaaaactgaatttaaatagcaaatattcacccatgacttgtcataactcatgaagtctccaccttgaggcatggtgaaatctcactagtgaaaggcctctgaggagagggaaggtggaccaggaagccaagaagagccctagggaggctgatgtagtgaaagggccaggtccaaggatctctccatgaaaggaagcaaaggctggcaggctgctctgtggcacccccacgtagtaggtgagatgcagcagtgagaatctttgattggaagtcattctcatgcacagaaggtggtaacagcttggttggtgagagactgatgagaagtgctgggtctttgttaaggtatgacccaggggctgagggttgaaaaatacagggtgagtgtatgtatccggtacactcagattgatagagtgtacctatcctctgcatactcacatatttaccctaggttttgtatcctagtctgtatcccggggaggattcatacttaccctaagttttcctatggctacactaagacaacagatgaaatgtgaagagtgacaaatgacagaaattgggcttctaacatactggacagctgaatgtagcagttaagatggcaaacccacaagtccctagattcaaacccctgttcccctagttaccagctggggatgataacatccatgtggatgttgtgaggatcaaatgagatactttctttaattgcaggatgctccattttgttattattatttttggaaatagaaactcttggctttaagtcacataatgttagagctggaaaattatgctacacctatggatttgactaagctgttcctgtagtttggccagttttaaaacaaaaaaatcctggcaacacactcctatcctcccagccccaacaaatctggctatctccattccctggtaggttcaaaacctgtttttatttccatccaaaagcttcccccccacccccagacatcgagtggtccatctaaaacagtgattgttaatactgttttgtaaatcttccagtccagatttattctagaacttgagtttgtttttagattgttataaatgtgcctttatttctagctgtttgacataacttttggatgttaataaaaaaaataacaccttgggaagtatggacatgggtggatagaaatgtaattgagaaagccatatccaagtagattgagggaattagtaaaggcctcatcacggcatacccaagtcataacatgttaaaagtttgctccgttggtgttcatcctcctgagacacccaaggctgatggcaattatcctattcatcttctcccacaagtctgtctttagcggaagatttttttctttacataaagagctatcatataaaaagtgctcatagtgccagaaattgaggtaaatgcaatttgcaaacattattatctcatttaattctcttgaggatagataatattagataaggtaaggattaaagagaggttaagaaacttgatcaaggacacccagcagggaagtacttagcagggctgttcactagggcctgctgtttctctttccagatgtacagactttctagagagaacgatgtgctctgcccaccctcacccctttgctctgctgttctgccagggacatgcaggagacggaggccttcctcttaaccgcaagaggccttccttttttactaatattcctcagcacagaccctttacgggtgtcgggctgggggacggtcaggtgtttctctttctccttcctgagatctttgcttccaatttggctaaggccctttccatgttatagtatcatgtatctcttattcttgtctttctcacttaactgtgagcccaccttgatgttagatattctgaaagtcattctcctatccctgaaaggtcttcaataaagatttttcctccacttagtggaaggtgaataaagtttattcttccatttagtagtggctcaataaaaaagtttgtggaatcaatcaagggatgagtaaatgaatgaaatactgaattttcctggcctatgaaggaccatgagctaaagcagcggtttaaagtatatagtcccaaacaaagaattcttactaaaaacacaccggatctgtaaggcagaggagggaggggcgggaggaagaagtcgaagagcagggtgtggtattccagggagactgaagacaggagcttcccatgggacaggcagttcatccacaggctcagcttctgcaacctccttcctgtggttactcctgctctctaagaattctgcatgttctcatcaagaaaataccaaattccttgaaagcctggattctgccttgtggtttgtgagccaatctcatgacaccaccagcccacagtgcttttcctgattccatggaggcaaactagacggagcttctagcaagtgaaacttcttttgggtagatatttgggggccgcttttaaaatttttctgacagaccaagtggtaaaaatctgtgtgtgtacacggaatgctctctcccttctgcaatgcgtttactctccttgtagaaataactgcttctcttagccggctcttgcttggagcagggaagagcaaagtcctatcatgtacacatacacagtttataaacatatactgtacaatcaacatgtacatatataatacaatatacacatgtgtgcatcctgtatctgtatactgtatatcatgcatatacaatttcataaacaagcttgtaccaggaaaaggcaataatttatatattatacacacatacatgtatatgtaaaatatgtacacacacacaaaatataccatacagagtgtaaggttcatgacgtctttctttcgttgatatttgtgctcacttattagcggtaaattattaattttagataagcccatcacagagtgaaggctcaatccttgaacagcccagggagaacttcgttgctacttttgaaaagccctttgatgtgcccaaagtctccagaagggcgatgccaaacccactcaactttgacaaagtgtgaaacgtctgtaaaaaggagttctctgatgtgtgagaggagacggaaccgagaagaaaaggccgtactctgccccccgcgggacccaggtccccgcctgctgcagagcgcactctgcgcacgtcgagccgcgaaaggttcacagaagaaaacaagagaaagaagtagcaggcactgaggagccgccggcgccggcgcccaggacggcacgtgacccgggggcggggccgcgcgggccgcgggccagtggatggggacgggggcggggccgcggctcggggggcggggtctgtggcggcgcagcttacaccgcggtccccttatttggatctgcgggaatgtgggctggagaggtcctgccgtggtaccagcctccagcctgcccccaggactgcccctgacccaggcgcgcccgctgctcggtggcaggagggccggcggagcgccatggcctgcatcctgaaggtaacgacttggatctgtggctcggacgcgtggttggccagccccttgctgctcagaggcacggagtcagccgcggtcccaccgcatcctcatctcagttgtcttttcctggcattgattttctttttgttcctttggcaaatgcatatggagggagattctgaaacatgcagctggcacagcttcttttcccaccattcctgcctcctgctcgcgcctgcattgaaggagctgcagactgttggctccaggggagagcagggctgtgtgccgaataatggggatggtagggagaggaggggtgttcccgcgggtcccgcggctctgtggagcctgaggcctttcaggggccacggggaggggtggagtggctaggcgtgagttgctggtggtgaggggcatagcgctttaaatggagggaagagtgagcggaggtgggctctactgtgcatttgatcatgtgaagacagaaacttctgagtttacaggtagtcccttaggaatgagttttctatgagatctgctagctctgtttgcccttagctctactttggaaaagttcacacgaggatgtatatgttagtagagaacctctcactctctttatgctcataaatttgaatagacaaaatgattttatgctctgccagagtgcgctcagccatcccttctttgttgagttttctttctccaagaccggattcttagcctcacctgagcatctttctgggttcacagacttgtggcctcaggtgggagaacttggtgtgagggcctcacttaaaaagaactttccatcccactggtagaggcctcccctgccctcgtttttttttttgcactacctttctacaagaacataacctggatgcatgaatcaaaaacatgaacagcatgaaagtttcctgggccttgactggagaatgcagagacctagttgtccaagcctgggggaactgtgtgacgatggaaaataccaggaaacaattcgttgttgttgtgttattgtgaagtagcatttatttctctataagatgatattaagtcatctactgtgttctggttacctgaatcgtcttctaacgtgcctggtgtcaatgatgaaaataagagactaacctcgtagaagttgtttccccttctttgcgtaaaggagatcagaagtttcctgtgagctttctgaacttcctctttttgtttcagaacattttccaggacatgaggaaataatacatcagtattacagtatggggtatttgaccgggaggctcttagcacaaggactgaaatatgaatatgagtcatctttactattcattgtgttatttgctgaaagggacattgaggagcatgatatttattgctggccatctttttctgttttggtttctcccctgccttgtcctatacatgtggtaaacatctttaatgcacatcccaaactacacatgaatctggtccaatctttctcttctagcacttcacactgctttcagacatttgggacatatctgtccaccttatcttccctccactgaaactaatgtgggctttagactcagaaagatatgtctggatgctggctctgcccactgctacctctgtgatgttggacaagttacttaaatgtctctgggccttagtttcttcaatataagatcaaagtagtggcacctgcttcacaaggttgctgtgggaatgaaataagatagggtatgaaaaatactttgtggcacaggcatttaatatgtgccatttttttcctctaacatataataataagtgcagtttggttgatccttactatatcctcagtctgtttcttataactattattttttataaaatacaaaatgttttttattctttaatctttacataaaaccctgaaagataagtatcattgttttaaaccccattttacagatgagaaagttgacgctccctagtttaagagatttgcccaaggccacacagggttaatgacagagtgatcctggatttagacccagatatgtcaaccttccatatactttactgctgttccagtactttcccaggtgatgacttttaagatggcctaataccattcagttccaaccacctttgagcacctttgagcaatccccttctctggtcatggtctagacagtctgggctggatcttttttctttgttgtctttgaaaagctacacatggagcagtgcagaatacaggtttcagtccagagacctgagttcagtgcaagcctggcttcttgcatatgattttagacagctgctgcaacctggagcctcagttttcccttgttgaagtgttcatagaattataaccattgcgttacagggtttttatgaggataaaactatggacttttttttttttaatgaaatattttctgccatttgctgaccctggacttggtgttggcatatgtagaaaaggaaagattttcctctgccctcttagtttctgtgcctggtcctgatagctaaactgacaaaaggcatattaacagaggaaaaacatacacattttatttgatgttaatgtttttatgtgtaccacagagggcttcctatataagaaataaagacccgaagaaggggagaggcctgagagtttataaagcattttaatagagaaggataaattgtggaaatgtgacaagacaaaggaaaaagggggtttgggctggggcagtcgattgtgagaaagtgggaaatgtatggggaaaactaatggaaaataggtgagtgtttttactagagatttattttggtgttgactctccatctttgatcataagaatgttctcctcttcctggcacagggaagggacatttctcatgggaaattttatgccttgcttttaggtagaaatggggaggtcagaaagcccttcctgtatctgctttttctcaattgcctttagctcaaaataatcaatatgccaaagtgatatattttggggtagcctgttctgattccttttacatcacaagatgcataaaccattgaccccattctcaaatggcttatggtttagtaaggatgatagaaaagtaaatgagtgcttaggttacaatgtgaagaataaaactacataggtccatggagggcatagtagaagcatggaaggagagagcaattacccctgtcattgggtagttcagacaggcttcccactgatgatattggagttgtgttttgaagactaaataggatttactatgacggagctcgtgttttagaaagataagttttgaggcagtgccaactttgttctgtgggctaagactttaatcttctcaatgaattttgcagtagattttactatccatttttacaaatgagaaaactgagatagagagatattgattaaagtatcattattgcctacacaatagtgaccctcactaagaagagacccccatgctgtggcagctaattttggtcttttaggggatatggaactatcccctcaaggtgctgtgcatgctgagggcccattctgccaatgcatagcgctagttctcgtaacagaacgatgatcacttcataatcatttaatttaggaattcagacttcacattgcctggactttaaagccagaaatatgtgacttttaattatggctccactccttattgattatagagccataacaagtttcttgatttcactacctcagtttccaaaatgggaatcatgcattcctcaatgggttattctaaaggttaaatgagataatctgtatattagttatattgcagggggaaaaaagaaactctgaatcttagcaggttcatttcttgccatgctcctggttaggcagctctcctgtgtagctctaccattgaataaagaatcaactcaaggaccagtctctttattattattatttttttttgagacagagtctcactctgttgcccaggctggagtgcagtggcgtgatcttggttcgctgcaacctctgcctcctggattcaagcaattctcgtgcctcagcctcccaaatagctgggactacagctatgcacccctatgcctggctaattttttgtatttttagtagagacggggtttcaccatgttggccaggctggtattgaactcctggcctcaagtgatctgtgtgccttggcctcccaaagtgctgggattacaggcatgagccatcgtgcctggcctaggaccagtctcttttcattaagcagctctgatgtcttcttgggccccagagcccttgtcagattctctgttttcagcagctccaggagacagattacagggaagatctcgtggggttgtttaaaaagtctctcaaatttgatagacaggaaaactctttgctttaatttgtatttatttgatcattagtgaagttaagcttttaaatttgtattagtcatttgtctttcttcttttataaattatagatactttaaaattttatgcaagaaaatctatccatattttcttttatgatttctacccttggtcagcaggtacattttcagcacagtgtcttgtacactttcatttttaaaaaatataggtgaattgtattaacttttatattggaagtggacattgagtggacatgtagacacaagatccttgagaatcatttctgccttcgagaagattatggttttgccaggttgatgaggcttatgaacatgaagcagttagctgatacgatagatgcatgactaagccacaattaccttctctccagtgacctgtcctcatatatttatcttgattgataggtaattagatgaatgatgataccaagttaggaacttggcgtcttctcatttcctcttcctccccctgccccagatctaatccttctccacagtgcatcagttctgtctcaggaaaacctctcaactctgccccttactttccatccttactccccctgccttgttcaactcccactttagagtcacatctgtggtcaggccatcccctgcctcagcaggcttcctctgtgctcctgtggtcttagttcttgtccctgtagtagcaggtattaccatgtactgtcaataaactgctttcatgcccagctcttctttgactatcaaatgttagggagccgcggccttccagtgtttactgagcatctgtaattgagttctgttcttaccctaagtgagattatagactcagtgagaaggcaaataattaaactagtaattaaaagtatgcgaggagtttgaaaattacacctcatggtatgggagtatatgggtggggtgttgacggttactgaactgaatgtaaaaggcagaaaaggctttgttttattcaacttggtatttctaagaactagcttggctctcagtaggtgatccttaagtgtttgctgaatgtatcagtggtgttattaatttttttttatgtcagttatagacacaggtccaacctgtcttctgaaaacagctgagcatttcaaggatgtggcatggattttttactctaatgtatagcaggcagattagagcttgttgattagtttgctccttaaattttttcttagtatgtttcttgtaggtaggtctgttaccattcctcatataaaatctggggccaatttaagatctggggttggggggatggggagatgagagaactggactagaaggagggaaaaagagaagtgtaggcgtggtttaacttttgtcatgatcattttggttccccagattaacagaaacagataaaccaaaaaaaaaaaaaaacaatcaaaaaccaaacacccacaaccaaatgattgtgtggttctcaaacgatgaggtctcaaagcatttgaaaacagtatggcttcactgagactggaaagccacagggacttcacaggtacacagatgataaatctgaaaccgtaggataaccctggcaagtagacaagtcacttcatttaataaatctgctatgacatttcttattgctgcccaggaaatgctgaattctcagcagctgcctggcctaatttccagtcttacagtgactgagcagatgcttttgctacgtatatcagcacattgtggggaatgagtggcttgggtaaaagtagtgctctttggatggattgataacaacagcaacaataggtgccatttattgaacagccagagtgctcaggctggcttctgtgctaagtaaacttttattacaaatgaagacactgaagttcagaaaacctaagtaaattgtccgatgtcctgtggtcagtaagtgatggaggtggggttcaccctgacttcgtgtggttgtaaagcaggggtgttcaaacttttggcttccttgggccacattggaagaagaattgtctgggccacacataaaatacactaacacgaatgacagctggtgagctaaaaaaaaaaaaaaaaaaaagcaaatcgcaaaagaaatctcataatgttttaagaatgtttacaaatttgtgttgggccacattcaaagctgtcctgcgctgcgggttggacaagctatagagcttgtcttttaccttcagtgccaatttagtaaatatttatagggattctgaatttatttcaccatcttctaccccagacaatatccagtctagacaacttcctaatctggtggcctgatggggaccacttttagctgtgtcgtttttatttgttcctttaagtttcctttgtgacagaagaactagaggaactagaggggctgcaaagactgaggagataagaaggctttaattctgtttaattctgaatagatctttgaccctgggcaagttatgtgaacctatgtgtcctttttgggggtgggagtgagggagagttggatttaccctgaacgcaagcttcagggcccttccaaggttctgggaagagacactagcattttggtatttataattttatattcattttatcaaggaatcccacaaatcgtatacatttcaggctccccaacatagatctgtcccttgggtggtgttggagaaccaaagagataatgcttgtgaatgcactttgcaaagcagagtgcactgcataggcatgaagtggaaatggcaaaaaacgttattagtattattagtactgataatagctggaatcgaggaaacctttgttgaaggactagtgggagaaagaaggggtttaggtctgaggaaaacagggaagcctattaagctttctagtaaacgactgagcgaagttatgaaagcttctccccaggagaaaaatttctgtttgtaagaatttaacacacacttatgcctgagggctgggagttgaatgaggttcttttctgtttcctggctttagggaacagtggaggaaggcatttttctaattggagggagtagatttacaagtgctacctggatcccattaccaaaagctgcagttagctcctggttattaaaaggctcattattcagtttatggattatccagaccccatttgcctccagccattctgatgtacacgttttatgccttttactgccaattagcgccttcacctgagcagagaaaaaagggggtgctaaaccccaaatttgttaatttctctccttgttagcagctctgtaaaggtttgtcagcaggagagtgggcctaggaaaaggttcaaatgaggtgaagggattatctgcgctttctctattgctgtttctctcaattcaaaaattgagactaggctctggttctgactgtaaactgatttaaagtcactaagtcagagaccttggcctgggatattaagagactttaataaacagcagccctagggtaggtgacattctttgagaagccccttaccccacactccatatctccaggcctctctttcatttcctgtgtgatgtggaggtgtgggggccaacaacatctggtacttgagagagtgagggagaatttactcctaaacagatttgtcggaggccagaaaaagaggatacttgggtcgttttcgtgttttttgtttttttttttaaaggtgtgtttctctgtgcacacatagcaaatataaatatacatgcacattcattcaatcttatcttaatatttactcagatttgaaaactatcgcacgtaaaatccttttctggaagggacttctctctgatttcaaaggctatttggtttcttagtgaatttattggctgtgcatttactacacacgaagtaaaaacttctttggtcagctatggaaacgatttgcatcttgctctgagaagatcatgatcacaagggaattggaagtaaaatgtgtatattctgggttggaaatgagtcctgatctgggattaaaacctggttgcaatactcatcttagattttgagaactagaatgagcaaatgactgtcgtgagttgatccctctatttgggactagtgggatatgcacttgcggtgagcagggctgtgattcctggtgctgtttgctgcgcggctggccgcgacaatgggctggactcgaaagaaagagaagtgaaagtctctctttgtgaagcgtttgccttatcagagaaagtggtaccagagaagagacacgagaactgctctctagggtgtgggcagtaagaagactgtggggtgcagaggtcagagctagaccgactctgagtcccatcctggctttgtgattaatatgaataaaacaataatacccttatttcatggtctgtagcagtgctgtccagcagaaatataatgtaggctttttatgcaattgtacatttcctaagagccattattttaaaaaagcaaaaaagaaacatgtagaatttaataatgtgttttatttaacttggtatatccaaaatactttcatttcaaaatgtactcaatataaaaattaatgagatatttatatctttttttttacaaacagttcttaaaactcggtgtacgttttacacttatagcatctctcagtttgaattctaaatttttcatcagaaatatttgatttgtattttgattttactaatttaaagtaaaaaagtaggttcactcgtctaagttgaattgtgcttagaccttttccagtagctgaatggaacattatttttaaaaggtaaattaattaaaatgaaatgaaattttaaaaatgtggtttgttggttatgccagccatgtttcaatgctcaaaagccacatgtggctagtggctactgtattggacagcatgctccttcaggtattcatcttcactatcagaagagaccactagactcagacaatgagagtagcgtaaggggctgcagaaaggattggctgctgggtcaggttcagatggggaggacacacctgttggctggactcctggcagccaaaggctggcgactgatgagcaagtaatgagtgcctgactcagggacacatctgagcgtttgatgagcccttgaaattttatctgaaaatgcagtcctcagtttcaccatatcctgagcctaattttaccccagatgttgtgcagctgtgagttttcccaagggagtgctgctttgtggtatgtgtgagttggctctttggtctcagtgtggtagtgtgaactcctggaggctttgagggcagacacagacttgaagcacttttatttgagttgtttcattgctccaggagggtattacacatatgggagcaatttaaatgtccagaacaaaccacatgtcttcttttaagtccagagagcaaggtgattgcagtttctttgttcggtttgcttattttttactgcttatttctgtgtgcataaattcagcgacatgctaatagacatatggccaatggtgcttagagaaaatctgtttgtaaacctgaatctctgttttgcctacacatttgcattgtattcctgccctgctccaactcgttgtcctagaccatccagtgttagcatttttctcatgagatgaacatttcgttataataatgacagtagctgtcatttgctgagggctttctgcatgtcaggcagcctactaggtagtttacagatatttattgtctcacaacaaccttcagcatgggcaggattggtttcatttgacagatgacaaaactctggcttgacaactttaccagcatgagagtgctagactagggtcagcaaactacctcctctagaacaagcccggcttgctgcctatttacatgcagctcctgagtaagaatggcttttgtgtttttaaatggttgaaaaaaaaatcaaaagaagaataagagttgacaggtgaaaatgatatgaaattcaaatttttcacccataaataaagttttattgaaacacagccatgcttattcaccatatctgctttcatggcacaaaggcagatttgagaagttgagatgggtactgtatggtctataaggcccaaaatatttactacccatctctttacaggtaaagtttgccaacccttgtgctaggctgttgagttctttcagtggactttaagaaccacagtgaagagcagtgtggttctttcatgtctggccagcaccaggcctcatgcctcacactctgaatggtggggatatttactgagcatagagctaaatacggtacgtggaagaggagactgaagcttagagaggccaagtgactgcccaaagtctcatagtggggctggaattcagacccaaagtctgaactcctaacagttatgttgacctcagtgctggaaaacttgaactacatcaggaccactggaagggacggttgtactagagtttgctaggccttaccactgtttctgattcttccagtctggggtatgactcaagaatttgtatctctaacaagccaccaggtgatactagcactgcacatctgggaaccgcactttgattagacctaccatatgacatccagctcaatgaacagttgttgagttatggaaattgcagagcatggattcaaacccatgcattccccaaaagaaattgactagaaatttaaatcaatttagcaatttaagtgcagtgtactccagtcaactttcttggcattgtaataatttgatttctgccttcattgttttcattaaactcaagatttcttctgatgctatgaggctcaggccactatgcacactgaaaaacttttgcctttgcacgagctaggggctgggactaaaattaacccctcactggtggcaccacttgtgtctggaaaaatcagtttgtgattatttctaaaccaaggaattttgttcctgctgattgcatatcaaatcctttctcacactttggaccccccacttctttgctggctaacagggagaattaggggtgcaggaaacagctttcacagttagattatgctggctttggttacaaaagttaatgcattagtgctagagttcactatcttaattactgggttagtctcatatttaaaaagtcattatttaaggattaggaatggggaaatcgaagactggtgaaagacgatagttttttttcgtgttgatgattcatagccttgttttagacttttataagtaataaaaagcactggatactgctgatttagtctcttcctagaggctcatatttgtgtaaagaaggaaattactctgtaagttttcccttttgctttttcctggctctctctttctgtgcctttgtctatattgaagcctatttttctgatgttccttcttcatctccagccttcatgccccttcccaatacaggtgttgcagggatcgttagctagaatgtctaaggaaccatactatcaacccaagagaagggaagcttggtgaactcttaaaaccaagtagatgaaaccttcttgcagagtcccgggatataagccattccattaggaatccttccctgggaaatatgaatcattgctatgcctgatataaaatcactgacatggtgttcatgacagctcaccatgtcatccctcacacctttgccatggcctggaggctgactacactactacttgtgtttgttcttttattgctgaccttgtcaaccaggtcattctttctctcttcctatttctaagagaaaattcattccccagaaccagcaagtacctgaaccattgccactttatatgtgctgccttatttatttttcatctcattctttggctgggagtaaaagaacctttctctcctaccctggtttatgttgcctgattatctgttcgtcggctggtttgatgtttatttaattctgccatgctgcttaaccttagaagcctggttttgtggcttgatttgagccaagatttctgcatgtgacttctaacttgtgggtaaattaaggtttgtttttctctcacccatctttgacccatgatattaaaacgttatttgaagaaaggacatccaacccatataccactctaggtttctgtgttaaaactattgaaatccactatacattatttcagatttatgtaggttaaagggatctgggtttgaccttttccccacttatcttcagcaaatagagacatgtgaagaggaagtttatttatcaagcacttatagagaatctaagtactgtgggtaagaggaggggtagagagaatggagataaaagattcactgaacatctaattttttttctaggggaatttagggtgtgtatgaatagtaataataattgtaacaatagcttacatttactgagtgcttacctgtactgtgttggggctttatatttgtggattatctcattttatccccacaggctcatgaggtacatccacctaggtgaggaaatgaaggcttggagaggctaagtcacctctcaaaggtcatactactagtagaagaggggttatactttgaatccaggtgtttggctgaagtaaaatacatttcctagagtatattactcagatcatacatagataaacctatttgtaacttgcccatgataataataactttaatgatacaataacatcagcaaacattttctggacacttactatatgataggcactgtatttaattcatacacatgatttattttaaagtttaacaatcctattagaaatctattttatctgaggaaactgaggctcggagagaacttaagttctttgtctgaggtcatgtggccagtgagtggaacacctgtggggtcatattatttgtataattgttattgttattagctaacagttactatgtgcagtaaggactaggcattgttctcagcactttacatttattaattcacttaatcctcattttacaggtaaggaaactgaggcacatagtggttaaagttacaaaactattctgtggcagtggtaagatttgaacccaggcagtttgaccctggcatctataacagatgcgcctatgaccacagactttgtttcctttgccactttggtggtctgtctcctagagcagagaatcactagtactattacaaaccattccagtaacaaattaacctacttaaaaggagcttgcggaaatgaaaatataacttgaattttgacttgaaataaactgaactttaaaaatcctttgaggctttttaaaaaatgtatttgaagaatttccaatcagatcaacttaggaaggcccacttaggtcaaatcagacatggaggaattaattttcttgtggagctggtgttgagcctaagtccatcgtgctgcctgggtggggaatgccaggcagctttccttctttgctttccctgttctctcctcaatcactcatctctctagataaggccacagaacagccagagtgatcttttaaaaagtaaataagatcatggcagcctatttgtttgttgatctgtcagtcaaaaaactaaaaggatcacaaaaaaaactaaagggatcacaactgttttgcttatcgctgtgtatctatcatctagcacaatgcagtcaacaaaagaatgattaaatgaattaattttaggcaaaaaaattagcatgtgcaaagatccggtggcatgaaggaacaggacattttgggaaacagtgaaaagttgtgtatggctggcattgagctggctttgggagctggaagagataatacagttgggtcagatcataaggatcatgtagattctgtcaaggagtgtagatttgatcctctagaaatggggaaacactaaaggattttgttttttttgaggtggagtctcgctctgtcacccaggctggagtgcagtggcacaatcttggttcactgcaagctccacctcccgggttcacaccattctcctgcctcagcttcccaagtagctgggactacaggcacctgccactacgcccggctaattttattttattttatttatttatttatttattttttagaagagacggggtttcactgtgttagccaggatgatctcaatctcctgacctcgtgatctgcccgccttggcctcccaaaatgctgggattacaggcataagccaccgcacccggccacactgaaggatttttaaacagagtccttgggttggctctggccattgtattttgtatttggaaattatttgtctcaatgatgattttgctacaatgattgcacacgggtaatttcaaacagaactttaaaagttaaaatatgctaaagatataagtgtgcttgtttatgacagagcttggagttgtatgtatcaaaagggtcaagccaatgacaacataactaaacattttatacaaataagttattagttgtacaggttgttaaattttccatttgatgaagggaatcaagtttgagcattatctcttgggtcatttagacgatacattgtggatttatggctccttttggtagagtcaactcttgacattcggttgacagtattgcccttaaggaggatgctaggtggtccttccctcagagtcactatatagcagctgtctgtgagtcctgccttggaaagacaatattattctttcagcagctattatttattgagcacctacaatgtggcagatgaactaatcatcttaccttatgtgagtaaactttatagcatctctttgaggtagatgtgtccccattttataaatggagacactggctcagagaaggtaagagtaagttagagtgcacttacatacacctgggtgtgcactgagagtgtatttatatacacctagaagttaagaataacttatctgagccacggtttctccattgtaagtgctagtggggccagggaataaaattcagatctgtctgacccaaaataccttgcttttaaccatctggtcttctacctctgtagaggagagaatcatttaggaaggagcctatggaaataattttgatctgaattaaactgattatcttttaaaagttaaggagttcttagaacttttctttgatgttaagaacttttaaactagattatacttaagaagacaatttatttcacttgcttagttcaggtcagacctggtggaattagtctcactgataagcagatacttgaacagaatcttgatgaataagcatgagcattaacttcagactaactggccggatggctgtgcctcctggtctacccacctactgctctccctgccacaagttcctcttcttcatttgtcactcttttatctgttcttggcacagcaaccagaaggaattttaaaagatgcacgtaagatgatctcattccctttcttatctggtcagtggcttcctttttcatttggaatatattacgatctttgaatcatgactccacaggcctacaggatccctttccagtctcctccaaggcactcagcctcttattattttctagctactctagggtcttttcaggccctgaatctgaaacatgacatttgtggaaaatgatgggaagtactttatggctaaagcttagtctggactttgggggctggtgggacattaggtagactaagggtttggacttgaccttgtaggtaatggaacacttttgagacatttttagcacaaaactaaacgtaatggagccactgagctgaggagtagaatattcttctattgtctttttagagtgctcagagtccctgcattgccactggtcattgccctttgtacttggaaatgacttgttccaattatgacagccttgcaattgcgcaggccgaatgtttatcagaaaactgtaagttaaaacatggcaatgacatctctctccttgtgtgtcatatttaaggcacatgttctctgaaatcaagaagctgggctaggatcttgcactggccccagaccatattctgttgtgaccatgcttcagtgagaatgtgtcacgtgtaaaatgaagataagcaagaatatcagtctgtttgaaagtgctaataaaagtaaaatattcttggcaaataaagctattaatgtaggtgttgaaattttcatttagtcagagcagtcctaaatttaaatgtaaccttttgagcccttagatcattgagttaagactctttctcatgcggatgaacagtaaatgcttgttatctgaagatgtaaattgggaggagtaagggacttctgccccattgtgcattaatgcctactgtttgtttccctgacttagaatgtggctccatatttttgccctcaaggcagctattgatggagtcatcctatgctccaaaccttgagctaagcaccacatatagtcatgtgccacatgacgacgtttcagtccagtcaatggcagactgcctatatgacagtggtcccataagatgataatatcacatttttactgtatcttttctgtgtttagatatgtttagatacacagatacttaccattgtgttacagttattatacctatagtatatagcacagtaatgtgctgtatgggtttgtagcctaagagcaattggctataccatgtagcctaggtatgtagtaggctacaccatctaggtgtatgtaagtgcactctatgatgctcacacaactacacttacggatgtggttctcagaacatatccctatcattgagccattcatgactgtatgtatatgtcagttaaagcttataacaacactgtgaatctgttttttcatcctgctgtgagtttggattgtttatgaggaaatgcgggcttagagaatttaattgcttaaagtcagagagttaggagatccttcagttttgactgatgtcaacctccgtgctcttaaccccagctctgtccaagtcataagaccatcctatagacaggccagaatggtacaagtggaaacacaggaagagatcttctttcctatagaccttaaataaaaatgtctcttggatcatcttgtctgaaagcccatctttttgggtttatttctctgattagagagatactttgttttgcctaatacgtatttttagaaagtagtacaggcatcagtcttttgtaaactctttgagatttaaataaggaagtttgctgtttgaaggactttgtggctaatcccttggtaaagaagtatcttataattgactatgaatgccttagtagctattctgtttcataacttgactttcaaaaaataataatggcaaaagatgacattttttgataagcaccaggtgcttttagaagcaatttttatgggagtttctaatctaatcatcacagcaacccttcaaaatgggtgctattattgtgtccatttgacagagaagtaaactgaggtgacagtggctagatgcagggatggcttcgtggcatgtgacctgcatgatcacacaggaccccatgcttagaagggccccatgcttggtgtaatattctgcaattattgtcgtagaagacttcataattttgaacaagggccctgcatttttattttgcatggggcctcataaattatgtggttggtcctgcctagccaaattgtccaaggccattccatggtgagcagcagagttgaggttcaaacccagactgcctggcgtccagcgtgactgcctggcctccagagtgattgcctggcctccagggtgtgctcttccattgtgtcctcctgcttcccatattcccatgttcttaagcactgtcctccatcttgtttttctctggacgtgtctttagaggcagaggcaggtggtttgactcatgtctgttgaattctaaagattcagaatttatttgttgaactgaatgtttgttacatacaatttcctaattaagtttgtgggagtgcagtagtaaagatttgaagatatgggaagaattgcatatcctggctatagtgaaaaatcatagtctaaaaataaatgggaataaagtggaaacactgtaacatgtttgctttgtacagctttaatggaaaaaggaaaggaaagaatacatatgaaaagaaggcagtcccttggcactgcctgtctcaatgctgtgtgctgtggactggggacacttaattaccacgtacaattttatggactgttcatgagaagcttctttttaacttttcatggattgcagtaaaggaaaatatagaaagatagaagaggattttcatcacgttggcaagaactgttcctccatgatctatggctagagcctgaaactgcccaagttccatctctcagcattttctgagaactttctgtgaagagaagttcagaggccagtaaaacaagtgtggtcacgaaaggaatcagaacatgactcccccaaatctgcctctttgacataaaattatttttgagctgaaggaaattaagaagcagtaaacaggggaaaagctctctctatcctccccattttctgcctgaagacaggatataaatcctcctctactggagacaactctagactcatcagctgagagacaacgccagaggaatctgcaaactaacctcacttcatcagttttctcctgtatatttaccttcccacagtttcccatccttggaagcccaaaacctcacttctttgtcctgtcttttcttgacaactttattgttctttgttgaacatgccacataagccagatgccacataagccagagttctaagctgctgctgtgggttacctttcattgaggtttctcctgtgtgatgtacactgcatgcattcataagttgtttgttttacttctgttaatctgtcttttattacgggagttcatcccaactaagaacttatgaggcttgggggaaaagttatttttcctccctgacagtcactgcagggcaactgacgttctgacagagggaggcatctgccacaggaacacgaggaaagcagctgatagagtcaggaggagtctagaggggtcaggggaattgtccatgtagagaagagggacagagtgttcatctatggagggaacagtaaggacaaaatcacggaggcgagggagatcacggtcaagatgaactgcagtatttggccctgggggaagtgttagaaaggtaggtggggaccaaatgctattgtgctaagttaaggagtgtggatttatatatcccaaggcattagggatggtgatcataatagctagcatttattgagagcttcccaagtgctaggcatgatttagtcccataatatccttattctccaacactcctttggggttagttactaatctcattttacaaagaagaaaactgagggacagagacttttaataacttacctaaggtcacacaactagtatgtttcagagccgggattgtgaactgggaagtctggctccagaacctgtgttcttgatggcaattttatactgattccagtgatggaagaattttaagtagaggaaacgtgtatatgatttacatttccaaagattgttctaatggaagtgtggcctgctaggtgcaaggagatgagcatctctggttttgccaccacagaaactatgaagacatgttctttaaaaatgacttctcctctcttcccttggtatatgggtgcaatcaattcttgctttaaataccttctccctgctctttctatctctgaacagattcctcacccccaccccccaccgttccttactcactgagctttatgctacttgaccatcactcaacatcactcaccaacctagccttctttcttcttcctcttggtactgctctctagattataaacatccatgtgatttctggtcacctgtatgtatacctattaggtgatacgatatgtacactcagtggtcattattaatacatgaaatggctgaggactctagaggcatgaatggagttagagtcctttctgtgatatatatacccctgggatctggggggcaggcagcaaacctctttggaccttagagacaaactgggcatagtaatcatatctgctgtactggttgttgtcagaaacaaaatgaaataagatgatatactttgtataaataatgtttatacaaagtataacattatactttgttatatggctacattgtctctagtgtaagcaattttatttacaatttgtactctacttgttttgatatcatttatggcaactttatgtattatagcatttcaaacctggagggatctaggcagactgtggttgattagttgatgtttagaaagactggttaattcactgccagaatgcagatggggtggttggggaggataactgttttctccaggcagtgggtcagactgttcccaaagtgtgatcttacccatatcacttaacctctctgggcatctgttacctcctggaaaatgaaggcaaagctgcctacttgtagggctgatcatgaagaagattgagatgttttctgtaaagtgcttggcacttagcaagtgttctataaatactattattattttcattcctgaaaaggaaggagttagtattctagtgttgagtgtcaaaagactgggggaaggagtgtgggaggggtttatacactttccttcccatcctctcagttgtcctccctcatctccactccctccatctccaatcttttctcccctcagggctgaatgaaattgaatgtcttgtaaacgtgtgcagcctttgccaccgggccctcggacatgcccttttaacattctgacataatggatgaaaacatgaacagctgacagtcattggttaaatctccaaacttttcattccctcacctgtggggatggtgccctctgcctggtgaacccagcccaggcagagattgcaggagctggctctgctggtggtgggcctggttacctaggcaacgtttacctgtgctgatgacaaagggcctgtcactgcctcctgatgcatgcagaagaatattaagtttgcggggagatggaaagaaacaattttctcttgaaatgaggtagatgcaggtgttaatttctttggagtgaattttctgttttcagagaggcaagggtagagcttaaacacaaacttctggctgaaaatatttagtttgcgaacctggcaagcctcttaagaaaaaaaacaatcctggtgccgggactgttaggcttcctgtcttttcagcagcttattgcatttgttttactgctttgaaggattggaagtctctgaaggccatttctttaatgacttggaatattaatgtaaaaacttgcttgttggacaatacagtgaatactatagctttgcctctaattggcttttcagtccttcacgctgtaaagcccccttcttttaagacattttctttattttgaaatatattttatatttataaattttatttataaaatatctttattttataaataaattaataatgaaggaaagtgcaccaaacaattaaatagcccaatgatttatcatgaagtgaatatattgatgattgctgccgttaacaaggtgaggacagaacatcgtaggtgtcccagaaacagtccttctccccactttcaacccttcccgtctttcactctcccaaaggagattgctgtcttggctttccaaagcaaataaacgaagttcttactagaggttttgttccctaagtgttcatttctaaacactctagtttagttttgtttcttttgaatttcatgtagaggaagtcatagagcttttttttttttttttttgagacagagtctcgcttttttacccaggctggagcacagtggcgtgatctcggctcactgcaatctccgcctcgcgggttcaagcgattctcctgcctcagcctcccaagtagctaggactacaggcatgtgccaccacgcccggctaatttttgtatttttagtggagacacggtttcgccatgttggccaggctggtcttgaactactgacctcaggtgacccacccaccttggcctcccaaagtgctgggattacaggcgtgaaccactgcgcccagccagagcattgttttatgtatggcttctgatatggtttggctgtgtcctcactcaaatcttatcttgaattgaagttcctataatccccatgtgtcataggagggacctggtgggaggtgattaaatcatgggggtggttacctccatgctgttctcgtgatagtgagtgagttctcatgagatcttatgattttataaggggctttccccctactttgctctgcacttctcttcgctgctgccatgtgaagaaggacatgcttgctcccccttctgccatgattgtaaatttcctgaggcttccccagccatactgaactgtaagacaattaagcgtctttccttaataaattacccagtcttgggtatgtctttattagtgcatgagaacagactaatacagcttctttttttcagtgttatgtttatgaagttcatccatgttgtggtgtatagctgtagttcattcatcttacttgctatatttcattataggaatattccactatttatctatccatttggccattgatgcatatttgagatatttccagtttttagctataaatactgatgttgtgaacattcctgtacctgtctcttggggcacatgtgcatgcatttctgttggttgtgttcctagaagtggtattgttggggcataagatatatgttatctttggccttagtagtataaaaaggttttgttatttttttttttaacaaaaagcaaaataattgctctcatacaaatacacaatgaacgtgtgtgaaagatgttatttaactcattaattaatgagggaaccagtacatgttagcagctggttcaaaggagaatggaaaggtccatgtatatgtaggcaataagagatgaggaaatgaatttattaataaaagtgaaatgggtctatccacaaggcaataatttgttgcatttccaccatacatattcacttgcgtttctatggacgggaagaatttgtatcattatcagttttctgcaacttaaatagttgtagaatagcagaaagacatagaaaggcatagtaacacagtagggtgcattagactgcacgatcacaatgcttttttttcttccctattctaaatctttcacaatttttcctgatggtagatattaccaacctgttttccaaaattagtgtatcaaattactcttccaccagaagtatcacagaagttccttttgcttctggacaacaattggtttaaacttttgccattctgttaggtaggcagtggtatctctttgtggttttaatttgcatttccttgattaagaatgaggttgaacaccttttagatatttattggctatttgaatatcttcttgtgtgaactgcctgtattagtcttttccccatttaaaaaaatgggttctcttttaccttttaggggggtaggagtgttttatatatattttatgcattaatatatattttccaatcatatgtgttgcaaatatcttcttccacattttagcttgtcttttcattcctttactggtgtcttttatgaacaaaacaattatactacagcctattttcttaattttttattttacaattaataattgttaaaatccctccttaagaagtctttcactagtttgatttcttgaaaatattttagcatattaatgtctagaaactacattattttgcctttcaaatttagatttaaaatctatttcgattttatttttctgtatgatgtaaaatagggcatcattttttaccccaatatggtatccaattttcctggcatctttcattgaaaagactgtgctttcgctactgcttggcagagacaccgaaatgttcatatgtttgagtctttttctggatatgttgctaaattctagtgatccattgatctatttgttcattttaataccaatgtcacactgtagttttttatgataagttttatgataagtctttatttctgatagagccaaacctcccaccttgctgtttctctttaaggtgatcctggccctttatacttcctttgagttttagaattagctcataaaattccacaaaaattgtggatcttatttactgagtttttatttaagactgcattgaatccttaaaaattccacttctaggtatttatccaagtgaaatgaaaacgtatgtccacaaaagagtggtacatgcatatattcatagcccctttattcgtaattgctccaaactggaaacaaccagtatgtttataaaatgtaaaactactaagcaatgagaaggaatgcactgtcgatacatgcaacaatgtagatgaatctccaaaacattacattaagcaaaagaagccagacatgaaagagtacgtaatacgtgattctatctatatgacgtttataaaagccccaactctacagtgatataaatcaatcagtggttgactgaagtcagggatgaagtgggcagattagtgggaagagctttacaggggcatgtgggtatcaactggggtgatgattacagagatcactaaaccacatcctaaaaatgtatatattttattgtaaataaataatactttattaagttttcttttaaagactccattaactccatagattcgtttaggaaggactaacatttttacaaattgagtcttccaacctaggaatatgttatatagctccaagtactattgcatttcaattctcacattaatattcttttgcttttatgtagaaatttttcatatttttcaaagaaatatccacttattttgaggtattgttaagtatttatgatacaatggaaattaaaaaattaaatttaattttgtttatagctggtttataaacatgtagttagtttttatttactgaaaattatatccagcaatcttgctatattgacttattaattttatctgtagattctttggatttctacatccacaatcatatcatttgctaaaaatggcacttttgcttcttcttttctagttgtgttatcttttatatctttttttacctgattgtactgactccaaaaattaatacgatgttgatatcaaagagaaagttgtcaatattttatcactgtgttaggtttgcagtagtgtttttatagatatattttaaaggaatttcccttctattcctcctttgctaagaagttttattcattaatggatgttgaattttatcaaagctaatcttgcatctattaaaattattatatgtattttctgcttaattctgctaatgtaatgaatatttgtaaaatgttgaacaaccacgcatttctggaagcaacccaattgggtcaagatggattaacatttttatatgatgttatatttagtttgctaataatttgtttaagctttttgcctctatgttcattaatgaattagacctgaaattttcctttctcataaagtccatgtcaggttttggttatcgaggttatgcttaaagtgagttaggaaatgtattctcttattgtttggaggtatttgagtatgatcagtattgttttttctttaaagttctggtagaattatctggggaagtcatcagaatctgtttttttttttttcctttgtgggaagttttaaaattatgcattaaaattttttaatggacatttttttaatgccagttttagattcacaacaaaattgagcagaaggtacagagataacccatataacccttgccccatccgtgcacagccttccctgtgaccaagatcccccatcagggtgctatatttgttacaattgatgatcctaaattgacacatcattatcacccaaagtccatagtttatactaggattcactcttggtgttgtacatcctatgagttttggacaaatatatccaccattgtgtcacgcagaatagtggtactgccctaaaaacactctgtgcctgcctatccatccctcccttctaccgtaacccctggaaaccactgacctttctttctgtctctatagttttgccttttccggaaggtcatatagttggaatcatagagtatgtagccttttcacattggcttctttcacttactaatatgcatttaagtttcctccatgtcttttcacagcttgatagctcatttgtttttagcactgaacaatatttcattttctaggtgtaccagaatttgcttatccattctcctactgaaggccagcttggttgctccaagttttggcacttataagtacagtttctgtattcgtaaacacagaataaacacctatatgaagatttgtgtggtaagagtgttttcaacacttcctcatgttgatcttttatattgtatgcttgttttcacttcagtcacgtctgctctttatccatttcctttcttctactttcttttgtttaaattgactgattttaaaaaatgatttcttgaagtggttagtagattctcaaattttgtcgtaatgtatttacacaatagggttccccttaagtactgtttttgctgttttagatgaaatcattttattatcattcagttaagagcagtttctaatttctaccagggattttctagccatcttttcattattgatttttggcttcattgcattgtgaggaaagaacacgctttgaatgatttcagtgcttgaaatgtgttgagatgtgtttgatttcataacatctggcatatttttatacgtgtttgctatgtgcttgaaaataaagtatatcctctatttgttgagtgcaatgttctatatgtttatttggccaattttgctgtttatgttcttcagattttctgcattctcactgatttcttttgtctttttttgttttatatgtttctgagagagatatgttaaaattccataatatgactgtagacttgtctttttctcaattacaaaggatcttccatatacctagtaagactttctgccttacagtctatcttatctgatattaataaaaccacaccagctttctttcagttagtatttgcctggtgtgtttgtgtgtgtgtgtgtgtgtgtgtgtgtgtgtgcctatttgaatacttttagctcctgcatttctatagcattatttttagatgtgtctcttgtatacagcatatggttgagttggacagaatttgtcttttaattgcagcattgagttttcctacttttaatgtaataatacacgggtgggttgaaatttattattttattaatttgctatctttcttttagtcctgcttgttccttgttccagtttctcctctttttctcccttctgttgaattgaggatttgttgttgttgcttttaaccattccactttttatttgtctattaccttggaagttgtatattcttttattattattttggtgcttacactagagattatagtatgcatcttgactcaggtcttagaccactttaatggcatttatcactctcttgacttctgtgtcattgttatgtattttacttctatacctttcagatgcccaagacattattattattattgctttattcagtcataattcattttgattaatcatatatttattcttttctttgttcttcattttattttcttgtattatttatctttcatctgggagcactctctttttgcctgaagaacatcattcactatttcctttattgtaggtctgttggtaacaaattcttttgttttttgtttgaagtgctttattttactatcactcttagggatatttcctctgggcataaaattctaggctatctgttatgttctttcaatacttaaaagatattttatttacttctggctttctttatttctgttgataagttagataaaaatccaatttttgtttctttttcacccttatgctgatttttagtttttttttttttttctttgtggttttagcagttttattgtaattggcctgggtgaagttttctttttacatttcctgcttggggtttctaggattctttgtcttggctccttctgaggcctgatatctttcttcagttttggaaagttctcaggcatcattcatcttgtcaaatattgcttttccccattcagtctcttcttttccatttccatgggctatagttacatatgtgttatacctcctcactgtatcctgtagtgtcttatcctgtattttccatccttttgtctttctatactttattctagttattttcttctggcttctaattcctgcttctgctgtgtctgttcttcctttattaagttattaattttagttaatgtatttttaggcctaaaattttcattcgactctctctgtttctgagtttctcatttttatgagttccataggatggcgtagcaaattactagagactgggtagcctagacaacagaaatgtattctctcactgttcaggaggctggaggtcaaggtatcagcagccacactccctccaaaggctctagggaagaatccaccccttgcctcttttagtttctagtggctgttggccttcctttgcttgtagctatctctctgtccctccatttcacatggccttctcctctctgtgtctgtcttaaaatttcttctgccaatctcttataagaatacatgtgattgcattcagggttcatcttgataatttaaggtaagtcctcctctcagcacccttaattcagtcacatctttttccatataatgtattatttgctcctttgctacataaggtaatattcacaagtctcagagattaaaatgtggacatatcttttttggggccaccttttagcctgctataccattgtacgttgaaattctcaactttataattttctctttctataaataggaagactttttacaaaaagtctgtttcagataattctagtatctggaggcttgtgggtgggtttctatttctgttatttctgctggttttgtttatgtcttcttatctccttatgtgcttggttatttttaattgtgtgtgagacagtatattcgtacaattttttacagatataatttgaggtcaagattgaggtttctcaaccccagaagggatttacatttgcttctgcaagcacttggggcattagaattctggaagcatctgattttagtttcagatattgagatggcttgaagatgatccatagacctctgcaagggcctcttagttctctattctcccttcctgctaggacacagctctttgaggagcccagtccaaaacaaatgatacacctggtcagttcccccatccttagcaggacttaaacacaaatctttatttccttggctcctcaatatgtcgttaggggagaaataggcccagaatgccagcttcttttgtccagacttcttccttcccttgatcctggcctgacgcttttttttttttttttagatttgaggtgttttaaagcatttaataaatgctttttctctcttttacttatcttcaatgggaaggtgtattagtctgttttcacactactgataaagacatacctgagactgggcaatttacaaaagaaaaaggtttattggacttacagttccacagggctggggaggccttacaatcgtggtggaaggtgaaaggcatgcctcacctgcggcagacaagagaagagagcttgggcaggcaaagtcccctttttaaaaccatcagatcttgtgagacttattcactatcatgaaaacaacacgggaaagacctacctccatgattcagttacctcccactgggtccctcccacaacacgtgggaattcaagatgagatttggtggggaaacagccaaatcatatcaaaagttttatctggcatatctagtgagtcattatcagaagcagtagtctctctgaagcttttctcatctatccaccttacatttttatgattaaaaattccaaaaattacagaagtggagggaatagtccaaatattcccccatcactcaaatgcaactcttatcaagattttgtcacaatttgcatggaaatattcacaacctataagaagagaaagttttaaagcaaggcaatatctcaactcacagccatccacttacctctaatggccagcatcagagacaaagacttctgccttggttactgctgtcctgagcttctagcacaggtgtgcccctagatgatttcagtgagctattgttaaatgaatgtgaattcactgaagaaccacagactgtgggagctggaggaagtcttggcttgtcgtaatgaaccacagattacagatggagatgctgacatcctgagattaggtcacagaggtgcatgggagagttaggccaaggtctcaactcagggctctctccacttttccacacttcctcctcattttgctagctcatttaattaccactttttcttcctttctgataacactgaagtttaagagcatttcattacaagtgtgatgatacaatgtggtattaagacatgacaaggcaagttttattggccattactatttgcctcaagtgagtggcaaagcctttgaccactcgaggcatatattaatagccctataaaatacatcctggattgctagtgctattaccgtctggctattacatttaaaaaaatattgtacaaataccacttcaaataattttcttactcttttttttaaactggaacgattagctttttttatgagagacaattcttcacatgatggagaaaatagaattgtcaggtaacatggaaagagtataagctttggagtcgtaccaaactgtgtgcaggtatttgctctgctatttatcatcactgtgacattaggcacttttcttaaactctctgggtctattttcttctctgtcaaatgacaacaagaatgcttgtcttttagaattcatatgtatatgaaaacacctggcatagggccttgaacataatgagtggtcaataaatcttatatttttgttgttgttattattgtcatgataatgaaatccaatgggaaattttttcttttaattagttgatttatttgtaagactaaaaatgttgttgttataacagatccttgtcttgcagggcagtctttctttgtttcctctctagccctcatcccttggaaaaatgagctgaaccatgttggttggtgcaagaggggctgacagaagagagttttgataaatccacaagataactttggaaactctttgccattttccctcctactcaatgctgctgggactttgagctcgctgaggcagtctaaggctgtgctttgacttcagtgctgtgccttgtgcttgggataattgtgttttccatttgatggcccccaatgctttgtgtaggaattggatggtgcacccatgctcctcaaatgctgaagcagtcatgtcacttggtggggtgaggtggatcatcagcaacaacatacttttcttttctttttgaattaagcacacggaaaaatccataatctaaacatgagggacattaagttttggatggaagagagtgaattttgcaacaataacaactaaaaacccaggacacagaacaattattgaaaacaacttgctgaagtatataaataaataaaagtgtcatttctgaagtatctttccttccctaggctcactgccattgtcatgggaaaagtgtgcatggcagcatttactctgaggtaataacatggatacatttcccgttgctcaagacttgtacatagagtctgaagacaaattcttcctatcttgctgagaaattaacttctatttttccattcctgtgagccagaagggtaattaccacatgctgttcagtcatgagtttatggaaagaaacacaggcttcattcagggtcttcaccaactgggtggggttgggttggtcatggagagaacttacattgtgggtttacagctgtactgcaaacatttcttcaagtctggagcaaactcagcccctctttcctgactaacttcttccctgcctaatccaatgaagacaatggttgatgagaataatagcagttattgcatattaagtattaatcagacatgttattctttaaacacacttttgctttttttttttttttttataataatcaggcatccaatgagatctgtcctctttttatcctcatttcactgagaaggaatggtggctctgaagagttaaataacttgcctaagctcacaattttagaaggtatggccaagactcaaacccagattggtctgattgtcaaagttgtgttctattcttaaccaattttctactttctttggtaccatgattatctccttgccttataaatattcttgtatgtggtattatctttgtcttattattcatagtacacaggggctttttttcttcctacttgcatttccagttccttccttattaatcagtgtgagctttttgcgattgagccctcttttctcttgccccacccgccagcccacctcctgttcaaatacagccctgcgggtgaacactatgggcgacccatgtgtgtgggctcataggaagatgcaatgtggagaagaatggaagcttctatggcagatctacattcttttttctgtcctctccctctctctacacccaatgtactttattttttggcccatttttgctcctatatgccctttcatcatcctcagaacctgtacccttggcattttgtcggtagacatttatatttcctggcattgaggctatagatctctaatacttgaattgattttcaaaattagggaaaagagctgcgattttagctatatatttgggctgtttgagttgaaaatgatgaagagtaaagtaatgtttgctgtaagaggtgggaggcaggactgtgacacggtcagctgactcttagatgtgtaataatggtctggcaccaccagtctctcactgtcttcttgaaatcacctctaaagaagagtttgatctggaaggtcaagcctagcagtgaactgaagctgttctctctgagtgcatttattcatttattcacaaagcagttactggtctatgtgcctcaagattcctaaatctcattgagccaccaacccttttattgaaagctacaggctctttttttcacaaaaattcacagaatacataacatggttttgcatgcaatttgaagggattcacagatcctttgaagcccatctgaggactgccagccaggacccctagcttggtgcactacctttcttgtttaatcacattctaatctccaaatcaaggcctcttccattgtgaatagagatagaaactcagctcagattctttgatggaactgtgttcagccaagttgtgtttgctcatcactgaagctttaagagatggttaaagaaacaaggtaactgtgtggaattacttatgatcacaaaggcatctgtagcaaaggatcagtctttacaggagttgtcttctgagcctgggtatgaagggtctctaaactattttatgggaaatttaaatccctcgatcgaaacaaattatcataggagggaagaaaaagtaaatctcattaatggttaggtgtagtgggttaagtatttgcaaaagtcttggtcattttgaaaatggtaataccagtgcaatgagttctgaaatctgtagacatagtgtgtgtgtgtgtgtgtgtgtgtgtgtgtgtgtgtgtttctgaagaaaataaaaattttcacatctaaaataaaggctcagtttcctttggggtgccttagttcacagcagtatgacagctaaccagaaagctgccatactgtgattctgtttttatattatttaattagatgatttaaagattctctaaaaattctggtgcagcctttgtgttcctgggaggaatcttacataacttggagtcctagaatagaggaagagaacagtggtacccaggcctcgtttgctgttatggtttatgtcgcagacttgctaggtatgacttccaacaacacaaacagaaggtgacaggttacaaaagagtagataaaattttttgctgacttttctcctggctacactctccctacttcctccccattaagagtaatgggagagttcctgaactaaagttgcattgtgtttccatgcagaaaaccaaagactccccgtaagctgagctgaggtaggcagggcatgaaaccgaagggctgcaggtttgtcatttgttgttaagagctgtggcatatttggccaaaggggctcattgtctacagccttctgtaagttattctgcaatattccattcaaaggaaaagcagccaagttctgtttccacctttctaaaggctttggtggttcctgtccattgggtgtgtgtcctgccctttgcctcactgtctcaataaagcatgtgaagaccagcttcctctccggtctggcggatctgttctcaggctgagcagagagtggcaaaggctgcatctgcgttgcttgctcctggcattgcctgcctgccagggcaccacacaagagctcgggcttacaggcacactttgggtgaagtcattcttccctgaaaactgagatgggaaatttatcctgacatgtcagaactgatgaagaaggctaagcaatggctacctgagcattagtcttgggagtgtgttctttcaagcacaggtttaggtttgcccttctattgtttcttctactaacacattatgaaggtagatttccactggaaaaaaaagaccagaatttgaaaatgtaatagagtgcatattcattattaagattataagaaagcctttgagaggatcaggcagtgagctgagaattatcactgaagtttaatttgtttattggatatctggatggaaaccagcaggactggccatgccctgttcctctttcacagccctgcttctgcccaaagggctcattcaaattctttttcattctttcagccctccacatatgcggagaactctcatattttccacattcctttcttctttggaatcctgctctaaggaaagaaataggtcttggtcacctataccttttacaccttactgtgaatgtcaggatagtgtataacctggatattgatactcctggggcatttgagtgttatcgtttactgtgagttagaagactttgacttctttaaaaaggaagtagaagccatgcttaaatgctttcaaaaacaaacctgcacagtttgtgctttgccctatttttgaatcatttgtattaatgctgtgacattgtgagcacagtgtgtgtgagtcttgggagaagtgaggacctgcaaagttctggcttgccactaacctgcactgtggctttgggagtgtcagctccctgcatcactataaaatgagtaggttgtattaggtgatcaccagaggccctgctagacctgacagtccaaggataaagttgagtgctaaaggagcaggctgtgtagacagattgcaagtgtccaccagtggatggtcttggcacaacaaggctgcctcctcatggtctttggtcccaacaagttcaatataaaatggaggaaatgttataattttaagcactgataccagggtttccttagggggagaattgcctttgtgtgggaaaataccgtgataagacatttggagtagattgtgaaacactgaagacattagtgtctgggaacctaagccaaaaaagagatgattaatcttttgtacacaagaaagtaaaaggaatttgtgctttgttcagccttatgcagaggtagaaaagaaaatagaggagaagagacaagagaggaaagagagagaaaatctggaaagatggcagaagactggatgctgtgtgtcctaaaagccttagtaagaaaggcttagagatattaggaactgtaatgtctaatgtgagatattaatttagtttactgtgtgttttgctctctagtttctgtgacttaccaatctctaataactcaaaaatggtttttgagtgaattattttgtgaagactagggaaggcaatgaggatttttttttgcctagattaattggaaacagcttgtatggaaataaaatattacaggcagaggtgactagaaaacatagccccacccagaaaactgtagacgtcttagtgagaggtttgcatctccactggacatgcagtttggaggtctctagccaatgtcgtctagatcttccagggctggtcaggtgggaggttcccaaatgacatttttttttttcataataaaataattttattgatcattcttgggtgtttctcgcagagggggatttggcagggtcacaggacaatagtggagggaaggtcagcagataaacaagtgaacaaaggtctctggttttcctaggcagaggaccctgcggccttccgcagtgtttgtgtccctgggtacttgagattagggagtggtgatgactcttaacgagcatgctgccttcaagcatctgtttaacaaagcacatcttgcaccacccttaatccattcaaccctgagtggacacagcacatgtttcagagagcacagggttgggggtaaggtcacagatcaacaggatcccaaggcagaagaatttttcttagtacagaacaaaatgaaaagtctcccatgtctacctctttctacacagacacggcaaccatctgatttctcaatcttttccccacctttcccccctttctattccacaaaaccgccgttgtcatcatggccccttctcaatgagctgttgagtacacctcccagacggggtggtggccgggcagaggggctcctcacttcccagtaggggcggccgggcagaggcgcccctcacctcccggatggggaggctggccgggctgggggctgacccccccacctccctcccggacggggcggctggccgggcggggggctgacactcccacctccctcccggacagggcggctggccgggcagaggggctcctctcttcccagtaggggcggccgggcagaggcgcccctcacctcccggacggggcggctggccgggcggggggctgacccccccacctccttcctggacagggcggctggccgggcagaggggctcctcacttcccagtaggggcggccgggcagaggcgcccctcacctcccggacggggcggctggccgggcggggggctgacccccccacctccttcccggactgggcggctggccgggcggggggctaaccccccgacctcccttccggacggggcggctggccgggcggggggctaacctccccacctcccttccagatggggcggctggccgggcggggtattgacccccacctccctcccggacggggtggctgccgggcggagacgctcctcacttcccagacggtgtggctgccgcgcggaggggctcctcacttctcagacggggcggttgctgggcggaggggctcctcacttctcagatggggcggttgccaggcagagggtctcctcacttctcagacggggcggccgggcagagacgctcctcacatcccagacggggcggcagggcagaggcgctccccacatctcagacgatgggcggccgggcagagatgctcctcacttcctagatgggttggtggcggggcagagacgctcctcactttccagactgggcagccaggcagagaggctcctcacatcccagacgatgggcggccaggcagagatgctcctcacttcccagacggggtggcggccgggcagaggctgcaatctcggcactttggggggccaaggcaggcagctgggaggtagaggttgtagcgagccgagatcacgccactgcactccagcctgggcaccattgagcactgagtgaacacaactccgtctgccatcccggcacctcgggaggccgaggctggcggatcactcgcggttaggagctggagaccagcccggccaacacagcgaaaccccgtctccaccaaaaaaaatacgaaaaccagtcaggcgtggcggcgcgcgcctgcaatcgcaggcactcggcaggctgaggcaggagaatcaggcagggaggttgcagtgagccgagatggcagcagtacagtccagcttccgctcggcatcagagggagaccgtggggagacgggagagggagggggagggggagggggagggggaggccaaatggcattgttatggggtcttatctgcaaacgcagaactccattatgttttaatgatggatgagccatttttacaaatttgcaagattctagaagaaagaacaatctggaatgtgttcttacatacttttttttggtttattttgtttttctgtttttttttttccaagatggacactcagtgtgaatgttcttatgtactgttgattgtacctctaagatgatgtaatgacctcatctcatctagctgtcaacaatggcccccttttggccagaggttatttgactgcttcagagagatctggaaaacacaatttcttagttttatctgtggccaattgtacctctgtaatggctgttttgtccaccattgttttctgggatttctgaggaaaattctgagacaagtaactcctttgtttgtggaagttagttttggaaattacaaatgaagtatctttttttttttgagatggagtttcgctcttgtcacccagctggagtgcaatggcatgatcttggctcactgcaaccccacctcccgggttcaagcaattctcctgcctcaacctcctgagtagctgggattacaggcgcctgccaccacgcccggctaattttttttttttttttttttttggtatttttagtagagacggagtctcgccatgttggccaggctggtcttgaactgctgacttcaggtgatccacccgcctcggcctcccaacgtgctgggattacagacatgagtcactgtgctcagccagacaaatgaaatttctatcctaaaacagcatgcattacctaatcccaggtggttaaaaaaatgtatatatatttaatggttgctctgaaaaaatatagacagcatgggttccaaaatattaactatagtaaggagtcccatcatggttttcatagcatcctatcctgtacttgtacttgtatgttgttgcatttataaagattgaaattcattactaatgtagttggttatcagtttctttcctagaacagggagcacctgtcctgaaccaggtccagggtagtgtacatgacacctcagcaatagagtgattttctctagttttacagtttctacagtgaacatattatttttcctaattacaaaatataaatctctttaaaatgacgcatgcataattaggtactcagtattacttttaggaaattatatttgtgcaactgaagaaaagacctacatgggaagaactagaatggaaaggaacaggttgagggatgtatataaatggtaggtttctcactttgggaggccaaggtgagcgaatcatttgaggtcaggagttcgagaccagcctggccaacgtggtgaaaccccatctgtactaaaaatacagaaattagccaggcatggtggcttatgccagcacatgcctgtgatcacagctacttgggaggctgaggcgggagaatcgcttgaaccggggaggcagaggttgcagtgagctgagattgcaccaccaaactccagcctgggcaaagagtgagaccttgtctcaaaaaaaaaaaaaaaaagaaaaagaaaaaaaaggtaggtttctgctcttggatctaagtgctcgattgtagagaagatatcataaagagagtccaaagtgtgagttcatacccacaatagccagtaattgacatggcagctttgttttgccttcacttaaaatactggcatggtgtgtattttgttgtctgtccttcagaattggattttgttttttcaaggagaaaaatagatgagactgctactataggatcccttgttagatatattacatttcaggatatatttccaggcacttcgtggtggaaatctggctctcggagcttaggcttggttttgggatattttctgcatgtcagtatatttcagtatgcctctaagtaaaccaagtagctcctcctccccctcaacacctggtatgattcatgactgatttgggtagctgtaatttttctaatgtcagttagaagggaaagaatttaaatttactacatgccaatcatattccaaagccatacttagtattaaaaccacagaaggagtcatttacatttaacaggagctgtgggtcttaagcaatgatcatttggtaatgtatgttttgattttaggttaaaaagaaccttgatattgtgggatttctggttttcagatgagtggctagtagcctgtttttagaaagacattggggatgggaacatgtatttggcttctttgagtacagaaattctgcttcttggtggaccacagtttgactttgttttcggggttaccttggtgtaacaaagcatcccttatgccttcagggctgtccttaccacccatcacctgccaattggttcctgtctatgtcagtgttttgaatcagaatatgaggtgtgaaaaatacttcattcgattttagaccactcctaccttttgggtagtattacatttgaaagtttaggatttggccttgttcacttgtttatatttttactctaaaataggtgttaaatatattttgagcatttactgttgcagggcactgtactaggtactatggaattacatacaaactggagagataggctctgctctcattaagcttgttgtatgataggaaagaaggaaaacaacaatgaaaaagctacatagccctttcattgcagagtggtcagtgctatggtgtggacagagtgtcctgagggagtctaagtggaagataagttgagggagaagtggatagagagtgtgtgtgaccttatgcaaaggcactggagtaaaaaggtgcatctgtcattgaagagaatgaaaaaaaaagttcagggacaggagctcagtgagggaaggtgagtatgcccagaccatgaagtctcctgggctacagtgaggactttggactctatgagctaggagtgttctgcccacttaaaaaaagacatgtaggggacacacattattttatttgcctgaagcttgaccacctctcctttagctcccttccgcattctggaaaatgcttctccatttctgtagctccatggttaccatggaggcagccacgttgttttaagctactctgtgtcccaaccacagatgattgatccagggattttatttgattccttgggggtgttggaattggattataaagtgaagagctgttggagaccaagttctgtcaagcagcctaaagagcagagatggaagaatgaagcaagaccacagagagtatttaaagtaaaatctggctgggtgcggtggctcacacctgtaatcccagaactttgggaggccaaggtgggaggattacatgagaccaggaattccagaccagccttgccaacatggcaaaaccccgtctatactaaaaaatacaaaaattagccgggcctggtggcatgtgcctgtaatcccagctactcaggaggctgaggcagaattgcttgaacctgggaagtggaggttgcagtgagccaagatcttgccactgcactccagcctgggtggcaaagtgagactctgtctaaaaaaataaatgaataaaaataaaataaagtaaaatcaagcagagataggatattcctgggctctccacatgctccaggcactggttccagacctttccaacatgaatcctagtcttgggttctataatataacagtattcccctaaaaagttttctgtccccactttctgtttatactagccacaattagtttctgtcactaatgtaaaattattttctctatatgtgcaggtatttgtagatatttataataattttgctttagggcaatcttcggattgtaaatgggccttaaagcttcttaattcatggaaagtcaattatcctctagtttagtttgaggatacaaagggacaggagaagttaagctcatctcatatttcccaagaatgtaaatgtgatgaaagggaactttgcagtctaagcaaaaacacttggacaagataacttacggacttgagtgtaaaaacttaagaagtgaactttcacttgtagcagttctctctgatgtgagtcttgctagtccactcaggttttatttcttttagaaggtgatgcaaacagcaatattattagcttaaacctaaaatgtggtttatttaatgtaaccatgaccaactgcattttcataattctgtctttgctgcattatcagctggcagggttattcacgctggactagctctgagcctgctaattcaaataaacagtccttgccaaccactgctgagctttgagaaggtctaggctaaagatgggcaaattaaagacaattccacactgtggtaagataatcaactactctgattacctagtaactaagctaattgggaagcagtgtagtatatgggataagagcaggctgtgtggattcagacctgtgtgggaattccacctctgctgtctacatgctagatgacttcaagcaagttccctggtctttctgaatctcagttttcctgttgataaaatgaggtaataatagtacctacttcgtgggactattatgatttagtaaaataatatttataagacacagtaagttcttttttttattattactttaagttctgggatacatgtgcagaatgtgcaggtttattacataggtatacatgtgccatggtggtttgttgcacctgtcagcccatcatctaggttttaagccctgcatgcgttagttatttgtcctaatgctctccctccccttgcccccgactccctgacgggccccggtgtgtgatgttcccctccctgtgcccatgtgttctcattgtccaaatcccccttatgaatgagaacatgcggtgttgggttttctgttccaagacacagtaagttcttaagtattagcattattatggatattattttgtaaagcagttaccataatgcctagaatttgataaatgctatttgctcttttaccttaaaaatgtacctatccatatctttgaaacttcagtaagtaaatgtcttccctgatttacctgcctttgggcagcaggttaagaatccctgacataaactgaccttctcattttatagacagaaattgcaaccccaaagagtagcaatttttcagggttgggcagagctggtctggagcttaggggtctgtctcctaattcagtgctttacccactacactgcctatttcaagtgcagatgacctagggcattctttggctgcatcaatatgtataaagagacacatgatgcttgcaaaaggtacagttagagacttttacaaacccccaaacttgtggatatggaaatgcttatatactccttatttttccccaaatcatatttctataaggattctcatttcctgtgcacattccttttttatgtgaatacagttttcctgaagtatcttcccttgcttgatggcaattttttctttttgaggtggagtctcactctgtcgcccaggccggagtgcagtggtacgatcttggctcactgcaacctctgtctcccgggttcaagcaattctcttgcctcagcctcctgagtagctgggattacaggcgtgcgccaccatgcccagctaatttttgtatttttagtagagacggggtttcaccatgttggtcaggctggtctcgatctcctgaccttgtgatccacccaccacgacctcccaaagtgctgggattaccagcgtgagccactgcacctggccgatggcaagtttttacaaggaacctgagtttgtagtcacttcacaggcattacaaggacaagggaggaatctccaagttttattgccagaaagatgctgggcccttgggacctacatagctattctaaacactggatacatcaaccacagaatccaagtttgcatctcagtgaaatttcacactagaacatattctttggaattcctcgtgaataattgaaacaatgattgttaagtcctttaatgctaaatatttactctataatggtcccattctactggacattggtcagactgccatgttccattgagggtcgtatttaagagagctgtggccaaacctaagttcacataacagcatgcagtgaggatggaaaggagttctaggagttgagttatgtgagggatggtgtatttggcctgcatgggagatgaagaggagtaataaaaggcaccatcaaatattttaagtctgtcaggggaggagggattttatttactctatcatactggatatttcagagaggcatattttaggctgtttattttaaaaagttaggtgaaacttgaacaacaatagtaactataacaattaagtcttccagttattgagcatttagtgagtacagagtcctatgctaggtgccctccagggattgtaatccctgttttatagatgatgataatagatatatgtaatagatagatgtaatccctgttttataggtttgggaattggtccttaactggcaggtccgtgggactgtaaagcctcaggaagagcaattgcctccatcacagaaagcataagaggttgtaggaagaatagattctgtgggcacaggcctgccttgtattccactctacccggagtgcccagcactgggcctggcctctgccagtggtcagcaaatggatgtgcaatggacacatgaacagactctgcatttggtgggagctttgaattctctgactggacttgaaggaccttccaaagtcactgaccatttagatggaaataaaatatacatccccatcacttggctgttaaatataagctcgtcacagttaaagtctggcaaggctggactgggggaacagtggcagttcctgagagtgctgagggtgggattttccttacagttctattaattggatgtgtccagagtgatctcgtgtttccttgagaattgtggccacatactgccctaagtgctgctctctgcattttgtggcagttgatgggatatgatgagtttgtggggacaaaagactttaaaaggtctctgtgagaaatgactcctattgcctttgggtgagaggccaatttatcagaatagcaaatgccttatgttagtggcatactttgaacacttgccatagaatgtctcctttgatccttgatagataaagaagatataacccccattttgcagaagacactgaagctcagagaaattataggaattgctcaaggtcacatgaaattccaatctttctctgagctccagggtcagttatcacctgcctacttgataactccacttggatagctaatgggcacctcaaatccagcacgacctaaacagaggtcccaactcctgctctttctctgaagagcactgatgctctctgtttcagtaaatggcatcccagggaacccaggtacattagtcctattgctgctgcaacaaattaccaccgacataaaagctgtacaaatttatgatttcacacttctggaggccagaaatctaatgtgggtcagctgggctgcaatgcttctggagtcttcagaggaaactgttgtcttgccttttccagctcctagaggcttctgatattccttggcaagtggcttgcattactctgacctctgctttcatcatcacatctccttctctgactctggccctcctttctgactctgcttccagctttcccttatagggatccctggaattacaatgaggttcacctagatattccaggacaatccccccatctcaagatctttaatttcatcacatctgcaaagtccctttggcatggaaagtaacatattcacaggttttggagattaggatgttggcattttgtgggccaatcttctgcttactacaagggatcacccgttgttctttcatccagtccatcagcaagccctgctgggatctccaccaccaccaccttacctgccaccctcactcacctgggctatttaagccaaaacatcccatctcatctccctgcttccagccttgcctccccactgtctgttctctgtatagcagcacattaaaaatgtgggtcaggccaggcatggtggctcacgcctgtaatcccagcactttgggaggctgaggcgggcagatcatgagatcaggagatcaagaccatcctggctaacacggtgaaaccccatctctactaaaaatacaaaaaattagctgggcatggtgatgggtgcctgtaatcccagctactctggaggctgtggcaggagaatggcatgaacctgggaggcggagctagcagtgagccgagattgcgccactgtactccagcctgggcaacagagccagactccatctcaaaaaacaaaaaaaatgtgggtcagatcacaccactgccctgcacacaaaccctccaggaggtttatatcatactcagaaaaaatgtacctgtattccttctaatagttctgggccttactgtctgcccttattggccttacatttctgagctcctctcttccactctccgcctcactcacgctgttccagccctcttgccgtttaaccatacctggaacatgcctggaatgttcttcccttagacatctgcatggctccctccctcccttctttcatgtctctgcctaaatttagctctgcagggctgtcttccatgtcaccctgcctgacctgacactgttttattttcccatccaagcacttggcacgactgaccatgtattgtgtatatagtgcttgtaagtgtatcatctacctttctccctcagagggtagttccatgagggcagataatttgcattttctcagaaactggaatgattacttgcgcatagtaagagctcaatgagtatgtagaggaaacctgaagtttaaatctaggtcttctggttctgggtagaatgtgctcttctctcccccatgcgttatcttcataggtggttaaagaaaagtatgattttgtaatatcagcgaagtgtttgttttcctaacaccttccaaaatatcagtcagcacaggtcaaacatgcccctatgtctgctcagaggcaggcaggtgaacaagtgaacagctctctctctctcaagccaatgaagagccgtccactctctggcaaagcactgagctatttgctgagagtttcccaaggtgaaccgaagactccttgaaagcctccttcactggctatgcaccacttgtaattatgtgcacacattttgtaaccctttcatgagaggtgggatcgtgcatatagtgtttgcatatcccagaattgctccctgaccagcacagctttttgggtaagtttaatatgggggtgattatgcttgagaatgttcactggaccacaaggcacctcccatattctggagatgtgtgtgagctgcaaaaggggtacgtgagctccaggaacaggtagcatcatttccatcagctcagccagactctgttgtgcatatgcggcatgctgaggattgagacgagagctacagacacaaagctcaaacagctccagttgttgctctggaggagcttgtagtctgcgtcagtgctacttagagtggggtctgtggaccagcagtatcagcatcacctggacatttattagaaatgcagaatctcaggactcaccccagatctcttgaatccagatctgcattttaacaagatgtccagtgattcctctgcacattaatgtttaagaagttttgctggctgggcacggtggctcatgcctgtaatcccagcactttggaaggccgaggcaggtggatcacctgaggtcaggagttcgagaccagcctggccaacagggtgaaaccccgtctctactaaaaatacaaaaattagctgggcatggtggcagacgcctgtaatcccatctaccagctactcgggaggctgagacagcagaattgcttggacccgggaggcagaggttgcactgagccgagattatgccattgcactccagcctgggtgacagagcgaggctccatctcaaaaaaaaaaaaaaaaaagctttgctatagggaaagtgacaaacacataagcagataattactgtgcacaatgagattgtgttaagaatgggaagagtaggaagcacagctgcccagagaggagcgtccactctaagtgagtgtgtgagtgcattttttgtgtgtggccagtaagggggtaggtatagtgcttggtcaggaatagctggcagaatgaggtcatagctgaggtaatgtttgaaggaaggagtaaatattttaataatagtaatcatagctttcacctatcgaatactgaataatagtgtaacaaataatagtaaacacaagtagttcttagcatgctccaggcccaggcctactcattttaattttttttttttttttttttttttgagacagggtctcactctgtcacccaggctggagtgcatgatctcggctcactgcaacctccacctcccaggttcaagcagttctcatgactcagcctcccaaatagctgggattacaagcacataccatgacgcctggctaatttttgtattttttggtagtgataggttttcaccatgctggccaggctggtctccaactcttgacctcaagtgatccacccacctcagcttcccaaagtgttgggattacaggcatgagccaccatgcccggcctcattttaatttggaatgcatttgttttaaaacattaactcattttaatctttacatgtctaaaaatgaaaagaaaagaaaaggggcacgcagaatttagtggaactcccgactacgattgctggagtgccaggtgagccccagctgggcaattcaattcatctcgtgcctgcccttcctctttggggagactgccttgctgctgatgaaatggaggtagagagctgtgaagctgagtcccgttagcatccccgtgatgaacaaatcatgcgcattctttcaaggtgatgtgaagagatgactaaaaggttttgaaaagttccagatagaaatcttcttagatggcattgactgggctggggaggggcctgtttctgtgggtgagttgcagtcctccctacctgaccttgcgcaatgtagtctgtccctggttggggatgtgccgcactccaccgactgcatattaaaaagctgtattgacttattcctaacagggaactggctctgatttccatttcacagcagctgtcatctgctctactcttcagcaacaaacacggggtcagcctggccccaacttttttccctcttgtgatagtgttaaaaagctccctaactgtcccagtctttctttatgtggatttgatattctgtctgctacctaggcctttcagagacctccttttgatcatctatttcttcaggggtttttattgttgaaataaaacttgggggtaaaatatttgtatacaactattaatcttcattgtccaatatggtagctactagctgtatgtggctctattgagaacttgaaatgtggagcatctgaaccagatgtgctacaagagtaagatacacaccagattacaaaagacttgattaaaaaatgcaaaatatcccattactaacaagaaggtaaaatagctcattaataatttttatattaactagtgaatattttggatctattgggttaagaaaatatatcaaatttaatttcacttgtttctctttactttttgttaatgtaactactagaaaatttaaagtttcctatgtggcatgtgtttgtagcttgcattacatgtctctggggcagcctctctctaaacccatttgaccaggagcagccaacaaggtttccatctgctggaatccatatttagagtcaaaggtcagtcagtttaattccacacatgggatttttccctcaccccctcctccttacctgttccctggacctccttatcggatcttgttcaggttttgggcactgcacctattgattgatccctcagtggctgctggttggctctttgtcccaccttcaccatcatctggtctttctgggactcctcagcaggctcctctgggtgggctagccctaaatgtgagtgatcctcacagttctgacccctcctccacctctctcccctctgctcctcttccctggtttgggactcagattcacattgaaccttttttaactggcagggcaagcctctgtggtccatctggaaagaaccacaaagcatcctttgtcatcctgttttagtatctagaatacactctgaagatcagaagcagtctctctgtacaagacatgtgtttcccatcagcagacagcagactcttttgtagctgggttcaaaatctttgttgttgaccgcttctggcatcttagcttttgtgaatctggggtgataccttttggtttccctgccttttctttaacaccagatctccttcatcctgatgcatttttaaacaccagtcaggatatgccatttatgttcatgctaaagtcttcactgacactcaccacaccaatctacttttattcccagttactatgttagaatcctatttagatagatggagccaattgagcgggccctgcagaaagccatattcagttagtgtaaatcttcctgctggtgttggagacagcaaggtcccctgggattctgtctggaaatcttattggattttcaagacttaagttaatatagagaccccccaagatagtatagggcctcatttctttgccttgaaagatgtttttagaggtctgtctcaagagtctcgctgataaggaagttacttcaaatatttcaagagaaacaaccacaaagagtcttctattttctcaatattttttctctccctgcccgtccatctttttagtattttttaaatgcctgccctctatatttatttccctctttctctcatgcactcattaaccttaggcccctgtttcaaatggaattaattagtaaccataaaacttggtaagtgatggccttaagggaaaagtctttctttcttctttctttctttcttttccctccctccctccctcctgcctttccttccttccttccttccttccttcctctctctctgtctcgctctctttcatgacgaatgaatataccttgtagacataagtgaatacatttcatgatactgtacttttttcttttcttaatcaagtgaacatcttccttagtgacatatagggtactgtctcctgacttttgctctgagacgcagcactcagcagaacagagtgtgggctttggattcagagccataagtttgagtcccagctctccctttatgctgggcaaacagtgtcgctcttctgcagttccattcccatgttagtaatataggcacgaccatttctgccttgccatattgtgttcagaactaaaggtgattgtgcatgtaaagtgcctcactcccagtgggctttcaggcatccccaggtgctgcgttttattcagttaaaaaagtcaaaggaagagtctaaacacctcccaccagggtcgttgataaatatcttgtctcagccttcttgagtccagcaaggatgtgaatgtcataccttcagtaaactagattttgtacttctagaagacttttattaggcacataagaaaatgatgctaacaaagttcaaagttgctccgtgttgcagtgatcttttaaaagggaagttttgaggtagttttgaagcagatttctggaatcatcttcaggactttcgtgagctcattgtaatgtgttatgtgaaatgcatgtcctcaaaacatgggtggttgtataaatgaggaagctggcctcatggagccaaagcagcatggaaaggcccaaataacttgctgtggggaagactgactgcctctggggtttttaatcagcatgaaaagccacccagggccccaaatcattagtagcattttaattggcagcagagtaatactgtgtctactttggcttaaagatataaatttcctgctctctcataacagatggtgatgaggtgcatggtaggaagcatggcaagaactgtgttactcaaaatgtagacttaattgcaaatttgaaatggaaataaagtgaaggttctgtctttatttacaataaatttcatgtgttaaatggacttgtctaattcttctattttaccatgcgattgaataataaacatttattatgtgcttctggcatgcactgtgttaaatattttacatggattatgtcatggatctcttgccatgatcctgaggaaagtattattgctgcttttagtagcatcgaatgttggaataaagtctgcaggggcagctggtaatatgtcagcaatgtctgtcttctgagatgagacagtgataaaagggctgactgcccacctagggaggcagtctcatctctcattagtgccaggagccatagaatgtgagcctggaggctctcaccaccaggtaggtgaccctgtgcacaccctcccattgctctcatcacattagaatagcatctgcagtctttactctcacctttaaggccctgcatgacccagcttcatcttctgctattctccctatgttctttttccttcctctgcttgatgttcctatgtagcagttattcctacctgagattatgttatgtgtcaaacaggaagatcaggctgccaatcccaggtggggattatcaacctgtggaggatggcaaagagtataacaccaccaatcacgagaagtcggagcccattgaccttggcccctgcattgcctatgggcttggaatccccaaggagacctcagcatacaaggtgcttgttggaacaatgctttattcacagaaaggagaaaaggcacagcaagatcagcatctgcagcacgtgccagtctcccatggttagcagaactctccagataaagtggaagactgtacccaggctgctctactgcaggagaacaccccgttccctcctcaaggggagcagatatacaagtggactggccaaatgccatatgatgaatacacttaagcggtagcagaaagttgtgtctccagaacaaggaaaaacttctcccagtgaggaagaagaatctaggagccagtggcaactccagatgagggaagtttcctggtccaggccactgactgggcaatcctggggagggatgacaggctgagcaatggctgcttccccgacagcacatccccagaccttcatcaagatgccaggacaaaaacctcaggcatgtcacacccaacagaacaaacagctcccccaaatatggagtgcttccatagtcaccaccgaagatggaggtgttttcagcatggtcctagaatgagtctcatggctccctgcccaactgagatagcactttgtcagggccagtccaagaaagatgatcaggcctccctggttctcagccctgagccccaggtgctgggatttagtcagttaaaaaagtcaaaggaagagtctagtggatacacaggtttacagacaacagccaccctgtttgaaggtagattgcttttcctgaatacttgatgtacacacagcaagatacgttggcaatagcatggactctgccctggagagtcacccaggccatctgtcctaacccaagggctaccacctctgcaggaacacattgctcttgctgtttccccaaacctctctgccctgatcatccaatcgaggcagtgaggttatggcttgtacaaattttgcgtgtcctataacatcacccacctgtacaggggagttgggagttcctgatgctaccagggggattttggtattgtggtgttttatgaccctctcctttcctgtggggtcccaaggaggtgaacaacctagggcagcataacttccaagttagagtaagggatgggcgtccctgtcaggcactaccactgcagggaccacagaccactccgggcacagtgttccagaaggagaaactaaaggagtggttgggtacacagattgggatgcctcagtcacagcctaatcaggtgactgcctgctcctctacccctgccaaactcaggattctccagtgtggatttcagtgccgtttccctttgtctggagtgcagtgtcaagagtccaaatggccccagtgaggtgagggtatcaccctgttaacaatccttctttacgtcccttctttaactgttgatttagtcttccattccactgttctgtggctctcttagcttatgggtggtgtgaatgtgggaggtgcagcatatgccatgggattgtgtccattgttttgtggcttgtgctatcaaagaagtgccctgatttgattggaattcagtagggtacccaaactcatggcaaagattttttttccagggcaactatggtggtaccagcattcacatgcagcacagagatgacagttctaaaccttaagtaggtgtcagctgctgtgaggcaccagaagaatccatggccgggtgttaaagatccagtgtgatccatctgccaaacgagcctgctgatacccctcacgataggtcatcattctcgtcatactgtttgggctgattggtgggaattgcactgcattcttggcttctgtgtcttctcggattacacccatggatttggcccattcctgcatttgagatgggattccatgactggttcattaaggcacccagcgtgtggcccttccaacttgttttggacaggctctgataccttaggaattccccttgtgttcttatttaagaggcactttgctgggagcatatacatgagtgataaagatttgcctatttcatgcagcaaacttgccatagtccctgttcccacacagatttttaatagttcagtcatgtagttgccagtctcctgacgaaatggctagaccaccacccaggaattggcaaagatgtagcaaggtgtgtggggtagggtggcttgtacaccattaccaccacatgaaattcagccccgtgggctaattgttctcttccagtttcaggtaagaatggctctccatggggtgggtggctgtgggggcacagtggactccatcaactcattttgcagaagcctgggtaaactaggccatgccttcagctagaacctcttcaacatggcccaggtgactagggaagggaccagcactgtgctccctctggcagggtggccacctgctcatgtagttgaccccttggggtcctggcctggctcagtcttagatgtaacatttccatttgatgatggaaccctcctgggcttttccagttttattagtgagattggtgaggacccaagtaaggatgagcacttgaggcctcagaaccacataatgtgctttggtagtgagatgttcagtctccaccagagcccaatagcaagcaagaagctgcctatgaagggtgtgtattgggcagcagcttcaggcagcttgtgtgtccagaatcgcagaggttgcaccccgctcagaggtggttttctgctgctactgactcagcatgttgggtgctgtggacatttgaagtttcatgcaggctccaaatatcccactcagagtcagggcctgggccatggcttgttgaatagttttcactgctcattgctgagaagtgccccatttgaaggttgctgtcttttgtgccaccttgacaagggggccagaaggatacccagatggggtatgtgttgtctccagtgtctgaacagatccaccagctgctgtgcttctattttatcagtgggagagccaggggctgtaacttctatttaaccttctccgtaatactctgttgattttatgctcagatgtccctgagaaactgtacttgttgggtgggtccttgaatcttatctggatttatggcccaactggtgttagtcctcgcattggtgatcgagcgaaaagccaaggccacttgttcttcagtgggatccacaaagaagatgccatctattaaacctgacttgggcttgctgtaaatcaagccctacccattgctgacaaatggcagggtcatgaagggacccctgagggaagacggaaaaagtgtattacaagccattccacaggatgcacattgatcctggtcttcttgcccctgggaaattgagaaaaaggcattggccaagtccgtgacagcataccagtctccagaataagctgccaccgactcagaaaaacgggatgatcgccagcactcaggggccaaggcatttggcctgcaatagtccaagccagcctctggggcacggaggctgatgtagtctctcagtctccctgtgttggtgacctttttgaccaggatattaaattgtgacaaagttgtttgatgcactcctgcttgcaccaggtaatttattcttgtattaaaagagtaatgtctttctttccacaatggataggggcttgggcaattctggaaggaggaagaggaggagtgtatttggcccacatggcttaaatattgctctgggtaggtgcagtgcatattcctgcaggtgaccctggttttcagtgtcatggctaccaaaatgtcattacccatagcacatgatgcaaggggtaccatgatcattgctgccgaaatggtcttgcccataagtacatgtttatttgttttctatgggctaccatgccctccccaaaaacacacaatgccaccattccactcctcccttgtgggggcttggtataataatcactaagcaacagtgtctcatagccccatgcttgttttcatactctcccccacttccatatttcccgtccacccccacagggcacagagctgcaggtcactgtgggagcgtggagcctttggccctaccccaatcattctttttaaaaggagtcagaatataggtagcacagctcctcctctttatctgagtctagctcataattggaaccaccattttcctcactatctgagctgggtattgggaaactccagcagcagcttgccttccctccagtggggaggaggggggagtatctgaatcttcaggggggcaatccaagactcaaaatccttccaatccggtgagctcccctcttcctgttccttaatggtctgcatgaggtccttcatctctaatttagggggttctctttcctctttatgtgtggacaaaggtcttcagtggagactgcctatctgagtcttatctatcctttgtttagaagccacaaccacattgcactgcacacgagtcctgcccctctgattgtctcccttttgggcccttggaggaccacttgtagaggtctctactgctcaggtctcatccacagctacagtggcttccaccttgcagctccctccatcagatgatgggacatggcagagatgcgtctccaccacctcgctcattgtcatcccagggacagaagaagggacaaggaagtcttccattgtgggggatcctgcctcttaaaggcctctagggctgtacaagataggacagcttcatctacgtcctgtctgggggagggtcatacagccaggtgtcaatggcctttatcttaatggccataatggttttctgaaccattttccagggagccttgcttccaagaaattcccctacagtagcatacactgtgattatgcttccagtcacccaaaactaatagtggcatcagtttgtctcggtcaggtcctgttagttattctctgtgatgtaggtgaaaatatgctatagtagggggatgggttgtcaacttccccaaactacatctttctgctggagtcacttgggtctgcaaggccccctcatccatcaggcacaccaaccaggtagcttgggactctcctggcctctgcccacatctattctttaatttccttatcttgctgccagaaattgagcacatttccatggtttcatcttcagggacaccattagtcctttggcattgttggaaaatggatctcatctgcctgtggctgcagagcctcactggttggagctctgtcctaggggccttcagtctgcattggagctcctaattgttgagccatcggtgtatcagcagtaaagtggccagcagtcaagggatagttttcctgctcgtcttatatctccgccatgggttccaccccctgtctctccaccatatgacccattggcccaagtcatcccagtctaagggaagatttggtaaatctcatttgtccacctatatccagagagtggccaaaatttctgccagctggttacccgctggagagctggggacagaaacataagcccttgcttttggtgagaccgcagtaagtatctttggcaaacctgctgacttccagaaactgtgcagcaggaagatccagctgctgatctcaggggaggattccattcatgtgtaggacagcagagagcatatattgttgacttccaggaggaggatcccacagacttttgctcactgcatcttctacaggtttggagtcaccaagaaggactccatgcacaagggctggttggaaaaacactctacttacagaatgacaagaagatgagcccctcccgataaccaatgcagggtgatagcctgcatgcagccctttaggttacaggcaacgaccccaatcccagcactccatctagtcatatagataagtggagctgtccaggagccattgacacatgtttaagcagtacaaggaaattcaccgtatacccagaacagagaaatatttatccaaataaggaagaagactctgaggccaaggaatagctggacacctggcttctaaattagggaatgtcccaggcccagggcactgattaggcaatcctgtggaatggcggacaggtcacaagatggctgcttcctcagcattatacactgtatgtttatttcttttcttcccctatacattctccagaaggcaggtgctttgctcacagctgtatccttactcattgaaactgagtaatgtctggcttatagttggcactttccatataaattgttgactgaattgagaatgagtaaatgcccttcaccttttccaggcctgaagctcctagtctatgagatgagggcactggacagatgacaccggagttatcctccagctctaacattctgtcactgccatgctgtggaggggtgtcacacatcagccagtggtttaaccatgggttaggagacaggtcagagacaggattgggctttttcctgctcagttttcagatgtcccttttccctcatcttttcttccctgtgagtcccttaggtgtgagcccctctagaggtggccactgcttgtttcctgtttgtgccctcctgacaaaaggtgcagcacctgaactcctgcatgggtagtgttttaccagctctggggcaatggctcttgccttgtgtctgtgtcatgaaaagcactgtcttcagacagactgtctctttcaagaacgctcaggctaagtaactacctgttactaaaactataacattttgccattataaaagtaatactttctggccaggtgcggtggctcacgcctgtaatcccagcactttgggaggccgaggcaggcagatcacctgaggtcaggagttcgagaccagcctggccaacatggtaaaaccctatctctactaaaaatacaaaattagccaggcgtggtggcatgcacctgtaatcccagctacttggagggctgaggcaggagaatcacttgaacccaggaggcaaaggttgcagtgagccaagatcgcaccactgaactctagcctgggcaatagagcgagactctgctcaaaaaaaaaaaaggaatactttcttcttaaaagtaaatttggaaaataataaaaaacttgctaatatgccctccatacaaatgtagcatggctaagatttagaggatttgttcctactctgttttatgtttgtttgctttattgcacaaagtagtgttttgcatttgtgttaatctatatttttttaacttagtatgtaagtatgttccatgttgttgtgtgacttgctttaaaaatgaaccaaatattgaacatctactgatatgatggaaactgaattgggtatttttacataaattagctcatttactgcagcactctagtgaggtggacattattatccctattttgcagttgaggaaacttaaggctcagactgtttcacctactcagatcaaatagctaataaggaccaaagtcaaaattcattggacatggggctgacttgaaaagcctgtgttcttttgggtatgcattttactggctaccaaatatcccatctatcatgccatgttgtgacgcaaatcgaacatcaggtgaggggccccatagtggagctacctgtcacccaagataggatttctcctttcaggcaacttcttcaaagcctaattcagcacacagacatcaggtagaaaggtgattatttcctgcctggataggtttccacccatgcggctctcctatactcttaggtgtacattattgattccaggagtcatatgtgtccctatctgtgttgtgggtaaggagccccacagtcttttctcttgaaagacttggctctggctcagctgtgccttgaatctgtgattctgtcgcataccccaggcttttctgctcaggatggggcccttttgagaccaggtctttggtgcttgctcatgtgcagtctggaatcagctgcacagggctgggaagctgcaccgcccacctctaacaggctcacagcagaattcttaacacaggtgctttattttagaagtttatactcttcattgtaaatagctaataaaaagcgacagctacagcccatttataaatgcacttccagaaaccaaattcaaagggtttactaaatggcaggaacctggtcaacagctgttttaaatgcatttatttctgtcgggaggcaaatgttctacaaaatagctttgttgtcaatagtctctttgttctttgatgtacagcttacaaataaatgcatttataggaactgctaatgtgtgagggttttgatattagtgctaaatttgcaatctataatatatcatctagtcatctttgacaaactcaattgtaatctaattaagtggcgtcttctgtgattctgagtagagatccctaaggtaattctatcctacttggttttcacaggagaaaaaaaaaatccctaagagtactgttcaacaaagtgtgtgtatgtgtgtgtgtgtgcataaaatattccttttagatgagcaaagccaagaagatacctagtaataaatagctttcacagttggttaaatatcagaactggggaggcatttgaccccgaaatcatatggcatctctagagcatggcaactctgggaaactgattgttgcttaaagaaagtttaaagtatttgggaagtaatttctcttttatttttactcccttaggaagatttggatttgcagcctttatcactaacttggtgagaatttttttgtaaagttgtcaaatctataggcctcagaaatggcagttctcatacaaatcccagtaacgatgctaacatcattcatccagtgtcagtcaatcctaggtgcttgaaaaacatctcatttagtctttacaatagcttatgaagttgatacttttgtctcagtctttaaataagaaagccaaaactcagattggtttagtgatctggtcaatattacagagccaggaagtaagaggaggaattgaaaacaaggtctgcccgcctgggagtctgtgctgttttaagtcactttactgtcccctgctctgccacactgcctgtgttttcagagaggaggcaaccactaggctaaatgactatctggcaaaaatctatgtggagttggttcttcctattatattgcatctgtctgggacacctgagtgtttgcagagattcttgccccgattttcagcaccctcagctgttagccgtgctatggatgtgatgttggggaatttctaagattgaagtggccagttgcatgtagatgagaagactttctttaatttgccctaagtagacattctgcgcagtcagtgtgttatagaaagacatttctgggaggcaggtgatccaagggatggtggtcaagaagcacagaatatatagagatgggatagaaacaaatgcaatgaaagatcaggacattttgttcaaagtagaaatttcaagtagggaatcttcctcccacctaccgtcatgaactccaaggagattatgatttaataatccttgtctttatgtgtattcttcagtctatgagtaaaacatgttactggtttctcttctctgtaagttgcagtcatgtccctgcaagggagctagtttgtatgtattgctaggggctttaagatggtgattctccaggctaggaacccttccaagagattctatcacttacccaaagccgaaacacttgtccagtttagcaggaaatatctatatgattttgaatttcttggtttcggccatttgtggctctgaattcactgttgccctgaggaagccatctctgacccaaacactccttgttaaaccactggcatagctcaagtgacttggaaacctcactgtaactactattgcataacttcaacaacaaaccttcattctgttgtggtaaaacttcgctctatattcagccacacattaattagtacttatattttcttaaatgtacactgtgcatcatgacatgtcctcaggatatggagataaaatacttcatttttgctctcaaagacctaacagtctagtgaagaagactgcattctgaagtctctgaatgtcaaaaagtgctggttgaaaatatttcatttttttgataaacatgagaataggtaaaatcattttcagaagggcttatggaggggagacatctggtcctttacaaagacagggtcactgaacccttagtgcttttgtgaggtgacagaacacagtgtccccagagtgatgtatttccttgaaagttttttttctttgagaacatagggtggggttcttcctgaggaaaatattgatattgccagcctgctcctggtgaaattgaaaaaaaccaggaaatttaaacaaaggcatgattcaagaccaatatttaggaggaagcactcaccacaggaccagaacctgacccatggacccttgtactctgcatcgctgcagttcccatgctcttcccagcacctccctaaaatgggtcattctatgcaaatcccaacagccttccaaatagaatgtcactgccctgattaacaagtatttgtatactttttctctaaaatgtctacttgacatatcatatctttttgtatgtttcttccagcttctatttgttctttagaacttcagtagagtgcctttttacatttaccaaacaatgcaaaggacttccaggtaagtggacccctagtaaactctccagtgggatagatgcatagctttgtaatggcagccaaaaccagtttgtaaagatctcattttccccttttttacccctgagaataaaaggaggagtttaaaaaaatctatgcactggccgggcgcagtggctcacacctgtaatcccagcactttgggaggccgaggcgggcggattacgaggtcaggagatcgagaccatcctggctaacacggtgaaaccccgtctctactaaaaatacaaaaaattagctgggcgtggtggcagacgcctgtagtcccagctactagggaggctgaggcaggagaatggcgtgaacccgggaggcggagcttgctgtgagccgagatcgcgccactgcactccagcctgggcgacagagcgagactccgtctcaatggaaaaaaaaaaaaaaaatctatgcacctacacatacatgcacaatcacacaaacataagcacacatatatgcacacttaagcacacagattcacacatacattcacaactcatacatacatatgtatatatatagcactcacatgctcttacaaatatacatataaacatatacacatataaacatacacacatagaaacacacacacatataaacacacacacacacagttgtacatggactgtttcttgggaagaaatgctcattcggcaacagtggcttctttttctctctttgtggatttgctccttggcctttatccctataggaagccaagctgaaagcttttaaactggtatagcttttgtcctgacacctatgtctgggtgacatagattctcagagagagggagagatatgaaaggaaaaaagtctctgaggaaatcgtaatctttcccgaagaagttcttgcctagtgccaggtttctgggctcagagcagattagcgaaacaagcactcagctaagagtccagggcctggtttctagttctggttgtgaccctaatcagccgggcaagtcacttatgttctctgagcctcagatttctcgcctgtgcaatgatgatctttcagattctaactctaaaattctgtgcatgtctcttttccagtgactgaggaagttcaaagtagaataggatggggatgacacatgaataagctctgaatcctcacctgtctcgaggaggaataaattcaatcctaatgccaaaacgacagaatctctttacttcctcactgctttgccaaacgctcatttagatgtatctatcaatcactggtttattcatatggtgcctctcaccgtgaaatctaggttctggaacaatataattggcctaattttggttttctgactgcagaagtggatgcttcctctgcctgtctctactctcagctcttattgttttttttggtgaaagagattaatccaatgctccgtggaagtagatatcaagaactcttgagcagagagaagttttgcattctgcctgtttgacatttacaaggtatttcattaacactgtgggcgattcaatccccttttatttttggctgcccttgctgtgcctctgaaggaaggaaggccattcttttgccaggtaaggggcaggaaaatgtgtgactccaaagctacctggagcctgatgggggttaggttggtccttgctgcccctgctggtcacatggtccctgcttactctgcttgccttttgtcttcctctttgtggactcctattgatccttgtacttcctctggcagagtgtttatcagattatattgaaattgcctgtttacttctgcctctcccacagaacagtaaaaacctcaaagactggggctctttctttctttcttttctttctttctttttttttttttttgacaggttctctctctgttttccaagctggagtacagtggtgcaatcacagctccttggactcctgggtcaagggatcctgccaccccagcctcctgagtggctgggactacaggcatgtaccaccatgcccagctaaattttaattttctaatttttttttttttttttttttttggtatagagggtcttgctaagttgccagagtgatctcaaactcctggcttaaagtaatcctcccacccaggcttccaaagtgctgggattataggcatgatccaccgtgcccaggcttgttttttattgtacacttagggacttgcctatggtaggtactcagtaaatgtttcttgaaataattaatgacttgggttgatttggatgaaagacggaatggacggagggcattttttagtagcctggagacttggtttccatgcaccatgctgggatgtccctggcagcccatctactgagctggcaccagcatgcttaccagtctcctttgtgacagtcccaatggatatttttattagccagcatgatttatttcataatgctgagttgcagcacccttcatggctagagatttttgctgtggagataagttcttagaactatctccatttccagaaaagagagggtttctctcgtctgttgcccagaaaagaagtcagtttacgtatgcatcttccctgggtcaggctaagaagtagccccagcactggcatgctagacttggagagtctaatattcttccagccaaaccctgaagcaaaccacacctcctaggtcctgcaagtccccattaagtgtgcttaagtcatttgaactcctagagaatccatgtcagaggaggagaatcagcattcaacaaaagatagcatgtagtttttttttaaaaagtgaaagactaaagcttgccttttctatagatcatcaacatgtttacttatagcaaaaaaagcatgtacagatggatttttgccatttaaatcattcattaaaatccctattttaagccaagatttataacaaagtttttggggaaataacacatacatcccctcccatctggaaatgaaaagaacaagcaaaatggatctagcatcttcattataatagcaccttagcatgtaattcagtctcctcatgacaaccattatgtaaggataaggagaggctctgcaagccacccatttctacactgccctagagttgagattcaaccaagacccctgcttcggtttaggtttcaatatacacgtgaagacagggaggaatatactcacaagacaaagtcctgtgctcattggcacctgatcaagtgctaaggcttcagatgaaaagggcaacagaatctccagggcaaagggatcagttagtggaggattctttagagaggagggaagagaccccctgctgggccttgggggatggagcatttagtcaggaagatgacatcccagtaaggggaagctacccctaaaagcaaaggtatggagatgggagggaatgcggagaggggtggagaaattccatctttgttagggcagcagtcaaggatgagtgagttagcctcttaaggaagaggctaagctgttagaataaagaggtttacaacatcagcggcttaaatcaaatagaagtgtgtttctctttcacatgacagagtagatgtggcctggcgtctagaaagcatatttgtctctgctccactgtgtcttccagggacccattcttctcttgtcttcatgctccatcacttcctagggtgttgtctacacctgcatagccatagctaattttccattctcagcaccaaccaggggaagaggaggaaaggtagcctccttttcatgataggtgtgaagttatgcaggacactctcagggtgaatggaccacagtgtggctcctgactgggcagggaggaagaatctgctgctagagaaagaagggaagacagtcatctttgacatcatgagttgcataagatgggaataaaaactggaaaagacctaaatcaccatattagaaaactctagccattctaaagacattgaagaatcctgtttggacctttttagcagtgaggagcgtccagctgtggttatctggagaatgcaataggcagaacttgctggtagaggccccgcttccttgtcttgaatgcctgcctttttttttttcttttaaatttttcatctgcttctggatcacattgctgtgagccacattgggtcaattcacatggaggattagatctgggcacaccgtatcttttatgtcttttatttctttgactttattctgctggaaagtgttggcccacagccagaaccggcagagggcaaaggagggattactttcttatcacagggaaattaaatgcctgagacagcaacatagtgatttttttaaaacaaatttttaggaaaattgaactcaccctgtttactttcatagaaggcttttgggctgtgggaaggaacctatttttgtacttaatgaaatggatcttggcagtaaagggtttaaaactaactttggatttatttaaaaagtaatatccttgccactaacttgtcttctgtctttaaaggaaagagaatttttacagtgcctatagagcatgccattcctcaccagtcatttggcagtcctattagcaaactcatttgtcaaagcctcattaggtgattgcaaaagtactctcccaggacccactttggacttcttaccaagtcgtgtgtgtgtgtgtgtgtgtgtgtgtgtgtgtccgtctgtgtgtgcatgtatttgaaatggaagtgtgggaacatgacagtgtagacaagcttacagcccccatttttctttgagtggccccctctgataaaaggttatatactggaagaggacttaaaacctttgaaaaatcaaattctcttggaatataataccaaagtgttgttgttgtttttcttgcatctacatgttccatgaatattttccaaacaattcaatacattactcttcagcccacgcccatgctgacatcaaaaacttttgggaagaaaaattgttatcgaatagcagtgtcgcaccaagcagatggggtcactgtcccccaggataaggcatttctcatgtgcttgagaagaagactgtggatctgaaaatatgataggggctgcggcttattgaggcctcactattgagagggggcttggagttatggggaacagtgggctctagtgcaggactgctggggtcttaagcccactggaccacttcctagcttgccagccttgggccagtttatagccttttgggcctcagtcttcttatctgtgagaaagtgtaatgtcacctcccatgtcactgtgagcagtacataagtggatctgtgtaaatagcttggagcatcatgtagcatgtggaaatgctcagtaaatgaaccaggtctctcaaactctagggcccatgtttttccccttcaccactaaaacctcatgagaagcatgggctcaggagtagcaggaggcttctggcacagaatgagaagatgggaaagcgtgctgcttggccacaatggaaggaggagaaaggtcaaggagctcggtcagtaatccccactctgaggccaaggaaagaggatggaggaaagggcaaccagaacatcaaataccacataagcaagaagccataagtttctttccaaactaacagttaagaaaacagacctaaccacttctactcagggactacatcttatttgtttttgtatccatagtgcctggcctctagttgaacttgacaaatattggagtgtgttggcctgtttcttgttcactcatttgttcagtcattcaacaaatatttaagtgcctatcatggaacagccactgctttgagagcttacaatcaatgctgaagaaaacaacacggaaggattccccctgccttggcttcacctgggaggggagatgggcagtgagcccatgctagcttctaatgcactcaccacttcttttaataaatacaatactctccccgcttcccctaatgattctgtgaagcaaactagtctatagttcctggtatcttcttttcttgaaaagttgacatagatgacagttgtgtcctgaagtctgatagcttctatgaatttctcaaacattggttaccaactggtttggggatcaccttgacaaactgtgtaatttagaggtgagggcctcctttattggagtcaggagacctcttggatttgtgtcttcactctgttatgagttgagtggcctcaggcatcttctgagtttctcattcctttactgaaaataataatgcttatcttaaagtagcttgttcagaacttgccttgtctcaagaatcagccagacatttataaacaaatctgaatcctgaacgtcaacccaggcttgtctaagaattctcctctttataatttttagctgctcagagtagagagcctgtcaccaaccctcacactgttattacagtttcctgtttctccttaacatttattccaccacattttgcacatatgactttagaccttgaactttcaagtctttctagaccaaaggacaacaatgctttccagagagtccagcaggaatcacactgggaaagctaaaaaagcaactcagtccttttcacccagtctatttcatccaaccccgctgcccctccttgaatcctggaaggatcatctattgcctttcaactcaaagtgtgggacgtgtactagcagcatgggcatcaccagggagcttgttggacacgtggagtctcagactccaccttagacccactgactcaatctgaatcttgacaaggttcctgtatatcatgcatgttactctttgagaagcaccagcctgttgaatacctctgggccaaaatactattcagatgtgttgttctttttcaattacggaaataattagtgacttaaaactcacttctgattcaggactgcatggctgtttaagtcgatatgtctgcgttaatgctgttgtaatgacatcacagaattgaggcatttatgaactggagagtaaattctatatgtgtttaaaaattagataaataagaatttacatgacagtttaataggggctttaaaaatttaacacggataagtcatctgctttttcaatggattttcctgaatagtgggatcacaaaagaaatttatgtgtttttctaagtttctttttcttttaatgtggatttacaagtgattaatttaaaaatttgctctctgattagcaggtaacatttataatctggacctgtacctaagatagcttagcaaatgaacacaaatggcttactaggtctttgcttttgaaaacgtatggccatctaaaagtagtaaaggcaatttaataaatacagacaatctgctaagcagccaaggaaaaaaggtgcctgaattatatatgtctgcatgagtggacaagacgtgcttttcaagattaatgatttaagctgttctttacgttcccagactgattaaacaaggcttaattctaaacaacactttctccttttcttgcttcttcaaaattcactgtccttctctatcccttcaggattgattgcaggggtgatccaggatggtgtctgtctaaagccttaacttctctcccttcataaaaggaagattatcccttttttaattccttgttttcattgatgtcagatgagaggcattcagaaggagtgttagcattcactgcactttccctgaaagtggctcaacttttgattgagatgttcttgaagattctgttagtggcatcttggcatgctcctgtcctctctgactttgacggctcctcccctcctccttcttttctccctcacactcctgtccacacttccagtcaagtgctttccagagcctgtcattcagtttcttttctctctcccaaatccatcgtcttttcccaatttgtaggattttttctttttccctcttgttcagcatttcataaagttagtcctgccaggttttaataggggttccacccccctcaccgctaaaaaaaattgatcaggacaaagtataaaatattaatttagacagttaaatatcattttgtttgttggtttagcctcaggacaaattagaacttttaatatgctgccaggaggggttgggtggttttctcatttctgaatttatttccctgtagaaccttctttgaaagtatctaggaagaccagtgtttgatgaaatgtactttccgacctcctccttgacatctctcctacatgcttctctccatctcatgctatgtctaatgactccgtgtactgctccacgtgtcacatcctcaaatacatcctaaattaaacactaccaacattagctaacttctactgatcactccccccacttctttttttttttttttttgagactagtctcactctgtctcccaggctggagtacaatggtgccatcttggcccactacgacctctgcctcctgggttcaagtgattctcctgcctcagcctcccaagtagctgagattacaggcacctgccaccatgcccagctaatttttgtatttttagtagagacagggtttccccatgttggccaggctggtctcgaactcctgacctcaggtgatccaactgcctcagcctcccaaagtgctgggattacaggcgtgagctgctgttcctggcctgatcactcacttttactgctaaggcttttaaaagtattttgcctctttgattgtctatgaaatcaagcacagatatcttaacctgagatgcaagaccatgtgtgttcttggaccaaccaacttgcaatcaatcttcccccttccccagcatttaacattcttctccatgcttgatttttctttatgacagagaactttacccctcccaatattctataccgtttacttacatattttgtttgtcgtctattttacctcaactagaacgtaagctccatgagactgggatatttgtttgttcatgctgtgtcccaagcacctacaacagtgtccagcaaatggcaggtgctcaacacgtgtttccaatacaggcggaatgaatgagggagccttctcagtttcatctctggcctgtgcttggtctttattccctactcttctcttgcctttttttcactctcttttagccctcaatcttcatctgtcatcatctctcttcacccctcagagcctaactctctaagtagcatttcttccaaggagccttctgtattcgtgacccttctctctttgtatgggtccctgtctttggaatgttgttgtttatacctgttttaccagtcagttacattctgccttgtagtagagttccttttaagctgaaaaaggataatggggtattcatgtttgcctcttacatcactgtggaatatgctcagtaaatttataattaatagaacaaacccaacattgtgcttccaggaaagtaacccccacgtgtgcctcagtctgtaccatggggactgcttgacgcatctgtttcctcagttgagcccttaagatgaatgcttgatatcctcaagaggctattaacgagaatttttatttccccaaagtttctttttccctaaaaggcatttctttgatatataacaaagctctgttataaaaatttcaactgctcatcccagtaggagagaatgttctacgaattcagatataggaaggtttccggggctatattttcttttctttttgggttttcatgttcacatttcatctacatttcccctcttgggcaaataggttgcccaatttagggcaaatttgtttggttttccttccgatatctttatttatttttctttattatttgcttcctctcccttccctccaagagagttcagatacttaccacaatggataaacttatgctgggaaattgcaatgcttttctttttttgcaaagtacagacctcatgtacatatgaaggctgctgacactagctttccatctggccacaggaaagtgtgtcatctctttcttccattgcctgtctcctgtccccaggggcctcagtggaggccagacagtaacttttctctctttcaaaaacccacccaaatccccagaccctttctaatacagcttttccacgtattcatgtatcaccacctgaaacttgttccattctaagttaaggattaactaaatgaatgaaaattgtatttatttgggagacagaagtagcaaaggcttagaatcaggcagacttgtgtttcatcctcagattctcctatttactcattgtataaccatagttcagtcaattcccgttgccgagccttagtttctttgtctgtcaaatgggtataacaatgcttgcctcatcatattcttgcaaataaggtcagataattcatgtaaagcttggagcacagtgtatggcacctggtaatcggtctctctatgatgaagatttgctgatgctgctgcttacttttctggcttatggggcttaggttctgaatctttataatctttttgtgcctgctgcatatggtcaaatcatgtttgtttgatagacagacatgtggggtttttccttaacaagccattcaaccatgtatagtgaagaattgctcatggttggtctgttttccatgtctagatattagaagagaaggctcaaacatgaggttactctctgtagtgcagtgggaaagagtatattcccagggagcctggcatcccccattaatctgtaagcagacctataagcaaaggaagggctttaggataatccccacttccccgccccaccagctttattgaggtataactgatgaataaaaattagatgtatttctggtgtacaacatgatatatatatatgcattatgaaatgattaccacaatcaaagctattaatgtatctatcagctcacatagctgtccctccaggttcatccatgttggtgcaaatgacaggatttccttcttctttaaggttaagtaatattccattgttccattgtgtatttttatcacattgtgtattcatatttctgtattcattcattgttccatggatatctaggttgtttccatatctttgcttttgtgaagaatgatgtgatgaccacagggctgcagatacctctttgagatactgatttcattcctttggatatgtacccagaggtgggattgctgggtcataatgccattctaggagttgttttgcacgttgctagatgtttcctgaatgatatgagaagattcttaaatagagggaacctccctagagccagagctcacctggttgattcctcctaggagggacatggtggtggaaagagctctgctgggaagaatggggactcagctcttctgcatactgcagtgtgactcaggcagacactgcacatttctgggctgcgtttccttctcctcaggatgagaaagcaaacctagactgtctctaatatcttacagcactgcagatcctacccctgcctttttttttccagcctccatctgagagcctctttctgtttctggtaagggtatcttcacccgtcaccaccctggtgggctggcttttacgttgagtgctttggtgtgaaaagcaggcttcgttcaagttgacttcaactttcctctttaaccttttatcatgtgttcttgttcactctcttccttcatggtgtcaagtaaagccagtagggatgaatcaggttcactgttcttttggagatgtgaaatccatgaatggggctaggtttcattatgtctccctctgggtagacccaattccctcctaattgcctttttcctgttgatcattcacatcttctgccttggaatttctttgaagttttatcatgttctcccttcatcatgtccttccctttgtgacttcagattttctgtgggtagctgtaatttcctgcagaacagtgtctactagattccctctgagcatggctggtgcagtggtaggattctgtgaaacgttgtcagatgtgtgagtgtgcagattgataaaacagcgtacactccctgcttcgttcccacctctgttttatgtggatgatgacaattacagcacagcacctcatatcggtgcagagatttctcctgctgtgatctaatggtggtctgtgtgcatgtggactgggaaccagaaggtggctttttctaggagatcttggctgcaggcaagcctatttctgccaagctagggattgtccgggtcttgatagagctagctgttttgtaccattgttagtagccaggctgtaattctgacatttcaactacttggactctgaaaaggtgtggttgggccccagatcatcagccaagtcttccactcagcctgcttcatgacctgacatgcttagcatttgggcccctttccaagagtgaagtaacacactgatggggagacaagaaagtgaaatagtggccccttggttctcacggggaagaggggagatgtgttcaggcctccccttcctccgccttcattggtggttcctaggtgagaatcactgggaatcaggaggatctatcagaactgggaatcaggaggaaccttcagatgttgtgggcaaacaggggggcaaggggtgacgttaaaactaggctttgtcactttcaaaagtctgcattacagtcagccatggagaaaacggcctactttctacatcacaggcgtggcttaaagatataaggccaggccatttgaaaaggtttagtccctcgtagaaaggcatacaaatcacccctcctagtttgggttcccacagaggcaggattccagtgtacatagtttatgtgggagatgatcccaggaaacttgggaaggggagtggggaatgagaaggggaggaaggaagccaataaaggatgtgctatcaagctcgccatcactgtggacagctgcagctcagttccactgggaacgtctgggaaagagtgtagcacaggtgcctctgagtgatcacacctgagaggggaggttctgctggccagagaacctctggtaaggaggtgcaggggctggcagttggtcaggcccatgggcactgttacaatgaaggctgagggaaaacgggtggggcatcgattgctttgctgcaggtcccatcccggattcaccttcccagggatgctagatgggagtctagacattgtctctacagaggatgaatctggaattcagaaagatgatggaggcccactgtggagaagccggttcttgagagttgggtgagaatccaggcttcctgactcttgctgcagtgccctttccacttggctacttaaggcagaaatttaaatttgtgatgacttttgaggcatactgtacctgattcatggaacaatattgtccttcccaccatgggctctttagtctttcttggagtgaaaaattgtcaaaagattaaatcctatttgggagccagagaaaaagcaaaagaatggctgagcgtgtaaataaagtctcctaggaagatcatatttttgaaggtatttattattcatatctttttgtcattgtcgtgttgtaagtgtttacctgggcttctagctttttgcttttccaaggacactgctgatccatcctagaagaagctgacagccaccaccttgacactggcttattgctgtccaggttatttaagatgcggaggaaatcttatcacagagaagcagcttctaaacatgtcctgccaggtgggtgatgaggtaaagactgcccaggcggccttgtgcacaccacatacttgtggagccactttgatgaaagggtctggattatttgcaaagtcttgtgctaggtgaaggtgggctctttcttaaattctgaaatgcccacgagtctttggtaatgttcatagtgaagcatctgagctgagcctgaggcttcccaggaggctgtgccaaggacaaaacacactgaggatgttgaccatggcctcctgacagaatgaaaggcccccacagtttcaatttaaaccgtaaacatttaaatagaaaatgaagtgctggtgtatgactctgaacttgtgagactagctgaaaacaccattttgaccgttgggcagagatttcccatcatgggatcagccatagaccatatccactgggaacatggagaaaaggtttagaggttccaccaacattttccttaattcttagatgccttttggtggttgaattctgtccttattttcttatttcctgaagcccaaaatataagctctataatgtggtcattcataaacctttagggatattcctattggaaaatgttgtgcaagtcttattttagagttcccagaagggaattaccggaccttaagatatgcacgttttgaagatattggatacaactggtctccagaagtgggaagaccatttttgctccttttaatagtggtgtctggtgtctctttcctcagatattcagtaatggatatgtcatgctttttcattttgcccttctgataggtggaaaatgacgtaacatccttaatttaagttacattttttggatgccattgtgaattttttttcccctatagctattgcctatttgcataccctctgaagttgcccgttcttgaaggacactgataatgttctcctcccctgccctttcctttttgttgccagaataacctaatctaaaccagaaactccatcttttcttccccagggctcctatagacccataggcggctagagtgtacctgtgagcctctggggagatgtctcaccgccagagagctgtccccaactcaggacctcacctgcctgtgcgtgcgaaattacacctgagatggagtggctgtgtccagctaacaaagccgtttggggaggggatttcaagcatggctattccttgttcactttaataaaacatggcatgaattcaggcaaagggacttactccttactccctcacctcagatttttctgtgttttgctgttggtataacttgtcctgtgttgctaagttttaaacatatctatattttgtttaaaacactaaccatggctttgtttgagtggcttatttttatgtcctaaggagttgacctagacagggaacagttagtcatattctgtttcaggccaatgcctctgagccccttcccttctcgtttttctctgtctgaaatgatgctcttggctggccccattttgctgtttgtccaaacgggcgcccctcagcaatgggcaactttctccattttggtgtcttatctaagaccttgcccactggcttaaagagttggcttgggttccgtcacagtgatgagttgcctgtcccgccgtctgtagtcgggagggctttttccgtgatgagaatgagctgcaaactcaggcaaacactgatcaggagagacatgaaacccaacctggcccagtcggcttaaaaatagtccagtcatttcacccctggaattttctcttgcttatgtgggtggacaattctcttggaacaccaccaagatcatgaggaggagaaaacagagcaggcaccaaccacatgaatccaacccaggctgaccccgtagccggtggtgcattggccctcacaggtttgcaccctgcatgcagggccctttctcccccacgagagggcgctctcgtcactcttaaagcaatcgtactggggaacactcaggttgtttcttagtgaagtccccgaagagcactgcatttaagctgctactttgtgtctcagcttctactttcaaggtttgttatgaatgtaaagacattctccaactcaagcaagtgtgggcaatattagtgtctggaaacgcctgttgcaaatgaagcacagccactgcttgtttgtgtttcgttagtgaaacgtgattgtaacccagggtttttgacgctcacagaagcatccgccttggtaatgctgtacatccaggctgctcttctttgtccctaacctggttgcaatgtggccgtagcatgcttgtgttgacatctgacaggagatgaggacttgacttcctgggctgatcttgcttattttggggagagcaggagtgcccgtggttagtgtggatcagcctgacaggagattttctattgagggaggatttaagactgcatgcaggcaagggaaatacaagccatatttcaccagctcaatacaccagggagcgctaccatttaacgaaaaccaccattctgacttccgggtttttaggtcatctggcagccactgggtggggtcagtttcttggcccttgattagaagttccttctgattacaaaacacctcttgattgaaatctttgcattttctttgcatttgcatttccaccaatctttttattttttattttttttgccttggaggatgtgtgtatgtgagggtgaccttctctttatttgtgggaatcggggagtgccctcctccctacaaagtcactataaagctacgggctttgctgcccttggtacagggtctagaagtggttgttgggtggtgaccagcacagtgacagtttatttcctggacctttgaacctaaattcccacaggaagaacataaaggactcagcaaatcttgccccccgacccccgtctcctccatgcgcctacactggagccatgagtactactgctaccgtcactacagccaaattattatagagaattactatgtgccaggcatgggtaatttttggttgttttaatcaactttgtttcaaacagctttagatttgcagaaaaactatgaatatagcaagagttcccccactttctcctttttttatttattttattttatttttttgagacggagtctctgtcgtccaggctggagtgcggtggcgcaatctcggctcactgcaagctccgcctcccgggttcatgccattctcctgcctcagcctcccgaatagctgggacgacaggcgcccgccactacgcctggctaatttttttttttttttaatatttttagtagagacagggtttcaccgtgttagctaggatggtctcgatctcctgacctcgtgatccacctgccttggcctcccaaagtgctgggattacaggtgtgagccaccgcgcccggcctcctatttttaacatatagtttctcctgttgttgttgttttaatcatattagcataacacatttgttacaattagtgaaggaatattgatacattattattaactgaagccaatactttattcggatttcctttattttgacctagtgtcctttttctgctccgggagcctacccaggataccgccttaccttagttgtcatgtcttcttaagatcctgctggcggtagtggtttctcagactttaaacttgtttttaatgaccttgacagttttgaggagtactgctcaggagtttagtagaaggttcctcttttggaatttgtctaaggttttctaataattagactggggttatgggtttttgagaggaagaaggcagagagaaaatgccattcttatcacatcatattcagggtacatattattaacatgatttaacgttgtagatgttgaacgtcatcacctcgctgagacggtgtttgtcaggtttcttctcgtaaagttactgtcccctctcctttttttatactgtactatcacaagaaagtgaccacgtgtagtccacacttaaggagggggagttatattccaccctcagagagcacagtacctataaacatttttgaaatttctctgcacagaaaatttctctcttcttccccatttatttacgtattcaattgtttatttctatcaatatggactcatagagatttattccatactttgagttataatcaaatagtatactactagattttgtttggttttttttttgcctctgggagctgtttcacgtgactcctgtgtccctttgacacacccccatcattgcgggtttttgtttttgaggtgtttctttcttgctttctttgtggcactcactacaagatactccaggattatcttgtacatcttctgccctagtccttgaatcagtcatttctccaaaaagccctggccttttttttgagacggagtctcgctctctcgcccaggctggagtacagtggcgcgatcttggctcactgcaagctccgcctcccgggttcacgccattctcctgcctcagcctcccaagtagctgggactacaggcgcccgccaccacgcccggctaattttttgtctttttagtacagacggggtttcaccgtgttagccaggatggtctcaatcttctgacctcgtgatctgcccgccttggcctcccaaagtgctgggattacaggtgtaagccacggcgcccagccagccctggctccttttattggagggtggtattagaatagggtctgggctccaggtgtgctggtgcttctggttgctgctgctttataagctctcagctgacagcaagaaaacatgtgcatgtgaaccaatctatagatgcctatctactgatctacaaatatatctgtatgtaaccattggtatctgtattatgctaaacatgtgttcacactgacgtttccagctcttaagctgttacatgtctccagctctaagccattatcacgtggatcattctagccttcccccttgcctatctgtagcctcctactccaaaaatgataaacttggctctcagcatctgtcatgcatttatttagttgttcaattccagtatacatatgtagcagtatcaaaattgttaacttatacccccatggaaaatagcctcgtcaactagagtacagtgcttgtgtacggtttattttgccttagttttacagactgcatacatttccaaagccacttaaatagcacctttttcttccatccactttagtgagggttgttcacatatgtaccacagattgctttgtcacatgctgtatttcattccgggattaccctgactgcctaaatgatttttttaaagtttatatatgttaagatttgccctttgtgctgtaaatttcaatgggttttcacaaatgcataatattatgtacccaccattacagtaatgtacagaataactataccaccctaaaaattcatctattcacccatttaactatcctccatacctggaaaccatggattttaaaaaactatctacagttttgccttttccagaatgccatataattgtaataatataggatatgctattatgtctccactttccacttgaggactctgaccttagaactcatgattgcccacggtttcttggcttgtaattggtgatgctagcgtcaacccaagtctctgatgttaaaacaggaactctgaaactccccactatgctgcctattttccaatgaaatgggtccaggaagccatctgataaatattttcactaggttgtcaaaaattaataaacatgcctctttcattaccttcggaggccatctgtggggtggttgtgagtcagcctctgcagccatgctgccagaatttgaatcctacctccttcacttcttacccatgtgatttgaacaggtggttttactttttttttctgtctttcctggcttactaaacaattcttcctttttaggaatatatgggaggagggatctgtgcaatgcagttctacaccctggacatagcaaccgactgagtcaggccaattaacttctctagcctagcgatttgaaacccagagccggggccctctgacatgaaggcacctttatatcttcagtctgtagggcaggtcataacacctgcagccacagttcctggggtggccccaagtctggatgcttagggatttattaattttttgagcaactccagtatcttaaaaagaattcatccttctcttccttttgttgttgttcttcttttattcttatttttaaaatttaagcgaggtaaaatcagcccctcttggctacaggtactttaattactacaggagatcatagtagctacctcactggtcataagggttaaataagataatgtataagacagttagcacagggaatgagggaattgtcagggaataagtacctggtaattagtagcttttactattatctaataatagttcttgatatttacttagtgctttgtaatgtgaaccatacactcctgtgtgcttatctccttgacaattgggtggaaatggcatccacattttatggatgagcaaatggccatgctttggggtttgcccagggtcacaaagctggcaagggactgagccaggatccccactcaggcccttcgtcatgtcatgtatccagggttctctccaatgtgccagggtcgtgtggtttcctgggggtgtgatggagagggaggcagtttccctttcccattttagggacaagagtggagatgggaaagtactttcctggggacagaggatggaggtgaaggtggtggatttctttagttatggggagttaagttgggaatgttaggcctctagtcctttccttttctcttttcttttctttttttgagacagagtcttgctctgtcagccaggctggagtgcagtggcacgatcttggctcaccacaatctctgcctcccaggttcaagagattctcatgcctcagcctcccaagtggctggaattacaggcatatgtcactggctaattttttgtatttttagtagagacagagtttcaccatgttgaccaggctggtctcgaactcctagcctcaagtgatctgcctgcctcggctttccaaagtgctgttgttacaggcatgagccaccgcacccggtctgggccctgagtcagtttctgacctgccttctgagctctgcatggtgcctggggtcagcctgcttctggcttcaccactctctgttctactgcatttattgtgcaaacagttgattgaatgcctgtttatgtgccaaacactgtgttagggaagatgaaaggatagatgagacccattaaggtctgccctttaaaagcttgtaatatgttggagaaaccagacatgaaaacaactaagtataacacaacataatgtctgaaagataaaaacaagtgttttcagaacacaataattcacagaatacctacacatgccataaactgtgctaagggttttccatggattagctaatttaatttccccatcaaccctacaaaggaattactgtggttgttctcatttcacagatggggaaactaagcacagagatgttaaatcacttgctcaatctttataaagataggaattgtagagttaagttccagagcctgccctgttaatgatggcactaaactgccttccagagaaggtcagaatgcatagctctttgtaggattgttggtgaaacttgcagagaaggtattttctgaactgatattcaaggatgagtaggaatttataggtggatagaaaaggaattgtattccaagtagaggaaggaatgtgagtggacacacagatggatgaaaatatataatgtgttcagggaatggctagtaatcccagaggtcaagagtggcaggcagtggttggctattacacttaaaaggttaaagctaatgccgtaagcattggggagctctcagaggattttaagaaggggagtctgtgtctagatacacttcaaaagggttcctgtagtagcagtgtgaaggctggtttgggcatgtgtcagaatcatttgaaagccaggagggcctgctggaaggcctcgcaatagtctaggtgagatcatgcatcggctttgggatgtggcagtagaagtgctggcttcttgtggttttgggggttggtgcttcacagagtgaagaaagaggtgtcacaagggtcattaaaatcccactggtgtgcctgttgatataggaggcacccatcttactctctaacggtgttctacaaactagccaggctgtgaactgttcattactgtttgggccaaaataaggggcttgcaccagaatataaatcaatgcattgcttccatcacggagaaaatcttggtgcacacacacacacagtctactgaagcaaaaagtgtgcttagtgacaaagttgatttggattctagtgcaagctcttatttccttgcagcccacaaacaacatgtggactttcaccagtccacaaccataaatagagtaatgctgctgtataatcaacatatcttacttgctctatacttcaaatatcttcttctctacagctgaattttgtagatgaaaaatttattttaaagtttcaacattttaagaggtttctttttactctacaggcaagccacttatgtaaaggacccatcttttaatttttgagttttggaaacttacatgagtacttaaccttgattaataattgataactctttctgtagagatgggccggtgacctcttgctactctccagcattgttaagtgctattgcctttcagacttcagattctttccaacctctaacacttgggccattattccttctccaaggttctcagaagtgatagagcactggagaggcaatgaaatcaatgatttctctatcacttgagtgtaaagtgtaaactaaattatcacttagcagccatgttattaaagggattcaaacattggtaaagtgtctggactaacagactttcaagattctttgcaaccccgaggttttcgatttgtcggaggtacagaactggtaagcggcagagagcggcagcacctaggtttcctgacccttgctgcttgcttccctgccgctcccctcagtccttcatcaagagctgcagaacaagttccactctccctggaggataggtgctgtgggtcttcatttaatggtgggacctctggagatttttctctctgctaatcacccaaggatgctttacatactctactgagatctaaatttatattgcagatgggccgatgctgatgtcttaaagtacttgctgggaagataatacccaatctctggagaaaagagctttacatttctttttactgagggctgttctgtaatttggctctcctaactctggcttgccccaacaatgagctacgtaattggccttaaagggacacccattgatttggacagggtctgtacatacaccagttaaacacagtgcctcatgctgggtctgtgtatttctactgggctttcttttctaaatgttatttaattccagagtttgcattagtgcttcagtcaaatattgtcaggctttggtcaaaaacccttaactgaagatcagggttggtcataaaaagttggaaatcgacatttgccaatgccaattggcagacagttggcactcaaattggggacagggccaggcaaaaaaaggtcttcaaaaactgtgctccaaaatcctctaaaatccactgtggttgcatcattgcccaaacttacagcttaatatgttggctttgctgcttaacagctgtgtgaatgggcatgttacttaacctctgtatttctccatcataagatagacataataaatttaaacccatgggttattgtgagaataaataagataatccatgtaaaagatgctcagcctagtccctggcatatggcaggtactcaagaaatgtttaatttgaatctgttgcatgcgcattctccgttgtagccagataagtctctctgcaccatgaaatgccattctatccctgcctttatgcttttgtttatgagcagaaggaaagtatgacctaatgattaataacatggcctttgctgtcaggcacacctggctgaagttttgttttctctgttgcaggacgcgggtgagttaattagctattttaagccccagtttcttcaccgtataatgggggaataatggtactgaccttacagtgttgtagtgagggtttaaatgagataaaatttgtggatgcctggttaagacaatcatgagccagcttattgagctcctattatgagttggtcctggaggtagagtggtgagcacacccagctgggtctaatggatgtataaccataaacagttacaagccttaaagtaaatatttacaaataattacaaaggggcaatgtatgtaagtgccaggtgagcagttagcaagggggcccagctaggtctaggggtcacataaaacttctcagttaccttgaataccatacaggatgtagtattaaaggttgacgtgaaggacaaagaggaggtgaccaggcccagagctggggaaagactgtccaaggcaggggaatagcatgtgtgtggactcagagaccggagagcatgcgctctgttttgaagagctgagaaaagtcctgcgtgggtcttgtaggtgttcaatcaatggcaactgtcattattctagattccctctcagggtgctgaatcctaaagcagcttgagtgcctaccttaagtctttttctctttttaatgaagcttcctttgactaactcagaactgattccaatctactctaaaaccttatagtattttagtcagtgctatatagatcaacacttagttatatgattttaaaagttgttcttgaagttttatgtatctttcctgagtcatcaaattgattgaaaattcactgaagagccctgattttgtattatgagtctccagagggcttagcacaatgctgagtccacagtgattaacaaatatgtaatgcttgttgcagaaatatatcttccacctaaaattctgtagtgtaccctgggcagtgttgggagggtgtacacttgggacccagattcgacaacttaaccattttctatgtgtataatcttgggcaagtcattctttttaagcctcagttaccttgaataaaaaatgaggatagtaccatagttcatttactgtaagactcattttcttttcttcacattttaacatctctaaaacttgaatgtgtcttacaataaatggcatgttatagtttaattggcagtattttttttctgtgttggtgattataaaataatggtgtgtcttaaattcagtgacattttaggtttgatgaaataaatacaacttttacattttaggatggttatgaaaattcaagctaatttacacaattcatttgtccacaattcatttacctgatgttggcatgacagtgaagaggtagctgcagacaatcaaaatcattcctgtgatccagtacaagctttgctaactgccaaagttaaaaactgttacggccgacatgcatgccagaactcaaaagccacctacctttagcctcaattcctccagatgtattttgctacttttacacattgttaagttttgtggcataatgcttaagatgttggatttgttgaggagttcccaccctcctaccctagttctaagccaattgagaaataaggtgaaaaaccaacagatgaagaatcaaaatgtcactaaattctagattgtagtgtgtagcttatatctatggttaagtgggctctgtgatactgagccccagaattacctgtgcatttagggatatgctgataggctgctgctgtgagggtgcaaaggagaatgaggatttctgtgggcagcccattccaaggagagagggaaagagctgggagctagactatacatgtcactcacagatcatgtaagtcagtcttcaggccagtaaagaaactccaatagggccctgcccaactaaagggaacttctggggtggggcagcacctggcatagagtaggcttttagtagatggtagctattagggaaaatcatggcagcttttgagaagaaaaagaagttatcccaaccttcaaaaatactctgttttttacattatgtaccccttaagcagacctttaagggcatgtatgtttgtctaggattcctaagcattattttcattaaatattgttagtccagtgattacttggttggttatgcagttctcaaatcaggtggattttaaaacattaatatctcagcaatctttaaatacactattcaaattatgtacttacagtaagtccataataatagggtgttgcaaacacaggaattgctatcataatcttaaagataaaaataatttgagtaaataaattaggaaggggaaaggctgatgttagtcaatgccaaagctgattttgtagagccagaatgaaaaaaaatatgtgattgaaaaatgtaggcatctatctgcaagactttctaaaaaaaatgcagatagtagtaataaactgcattgctggagagaggggactaaaatgtgtgtgtgtgtttttaagatttaacttttaagttcaggggtacatgtgcatatttgctatataggtaaacttgtctcaagggggtttgttgtacagattatttcatcacccaggtattaagcctagtattatataggtaaacttgtgtcatggggtttgttgtacagattgttttgttgaccaggtattaagcctagtacctgttagttattgttcctgatcctctccctcctctcaccttccttcctctgataggccccagtgtatgttgttcccttctgtgtgtctgtgtgttctcatcatttagctcctatttgtaagtgagagcttgcagtatttggttttctattactgccttagtttgctaaggataatggccttcagcttcattcatgtccctgtaaaagatatgatcttgttccttttaatggttgcatagtattccgtggtatatatgtaccatgttttctttatccagtctatcattgatgagcatttaggttgattcaatgtctttacaagtgtgaacagtgctgtaattaacatacatgtgcatgtgtcttttataatagaatgatttgtatttatttggatatatacccagtaatgagattactaggtcaaatggtatttctgtttttaggtctttgaggagtcaccagtgtcttccacagtggttgaactaatttacactcccaccaacagtgtataaccattcctttttctccacaacttcaccagcatctgttatttttgactttttaataatagacattctgactggcgtgagatggcatctcattgtggttttgatttgcatttctcaaataatcagtgatgctgagttttttttcatatgattattggctgcatgtacatcttcttttgaaaagtgtctgttcatgtcctttgtccactttctaatgggttttttttcttgtacatttgtttgtatttcttataaatgctagatattagacctttgtcagatgcatagtttgcacaaatttcctcccattctgtaggttgtctgttcactttgttgagagtttcttttgctgtgcagaagatctttagtttaattagatcctgtttgtaaacttttgcttttcttgtaattgcttttggtgtcttcgtcatgaaatctttccctgtttctatggccagaatggtgttgcctaagttggagtttttctagttttgggttttacatttaagtccttaattcatcttgagttaatttttgtatatggcggaaggaaggggtccagtttaagtattctgcttgtggctagccaattatcccagaacaacttactgaatagggaatcctttccccattgcttgtttttgtcatgttgaatatcagatagttgtaggtgtatggccttatttctgggttctccagtctttttgattggtctgttttctctttttgtaccagtactatgctgtttggttactgtagctgtgtagtacagtttgaagtccagtagcatgatgtgtccagctttgttcattttgcttaagattgccttgactatttgggctcattttttgcttccatatgaattttaaaattgttttctctagttctgtgaagaatgtcaatgctagtttaacaggaatagcattgaatctataaaatactttgggcagcatggccattttaacaatatcgattcttcctatccatgagcatggaatgtttttccatttatttgtgttatctctggtttctttgagcagtgttttgtagttctccttgtagagatctttcacctccctggttggctgagtattcttaagtattttattatttttatggcaattgtgagtaggattgcgttgcctattcggctcttggcttcactgttgttgatgtacaggaatgttagtgatttttgtgcatttattttgtaacctgagactttgctgaagttgtttatcagcttaaggagcttttgggctgagactattgggttttatagatataggatcatcttgtctacaaacagggatagtttgacttcctctcttccgattttgatgcccttttcttctttctcttgcctgattgatctggccaggacccaatactgttgaataagagtggtgagagagggcatccttgtcttgtgctggttttcaagggaaatgcttccagcttttacccattcattatggtgttggctgtgggtttgtcatagatggttcttattattttgaggtatattcatttaatacctagtttatcgagagtttttaacatgaagggatgttgaattttatggagagccttttctgcatctattgaaataatcatgttttttgtctttagttctgtttatatgatggctcacattaattgatttgcatgtgttgaaccaaccttgcatcccagggataacaagcctatttgattgtggtagataaattttttgatgtgctgctggatttggtttgtcagtattttgtagttgatattcatccaggctattggcctgaagattccttttgttgttgttgtgtgtctgccaggttttggtatcagcatgatgctggcctcatagaatgagtaagggaggagtcactctacctcaacttttgggaattggttcagaaggaatggtaccagctcatctatgtacatctggtggaattcagctgtgaatccatctggccctgggcttttattggttggtaggctatttgttgattcaatttcggagctcattattgtctgttcagggattcagtttcttcctggttcagtcttgggagggtgtatatgtccagaaatgtatcaatttcttctagattttctagtttatgtgcatagaggtgatcataatattctctgatggttggttgtatttctgtggggtcagtggtaatattccccttgccatttctgattgtgtttattggaatcttctctcttttcttctttattagtttagctagtggtatgtctgttttattaatttttatcaaaaaacagctcctggattcattggtcttttgaatgatttttcatgtctcaattttcttctgctcagctctgattttggttatttcttgtcttctgctagctttgggattgtttgctctagattctctagttctttagttgtgatgttaggttgttaacttgagatctttctaattttttgatgtagtcatttagtgctataaatttccttcttaatactgccttagttgtgtctcagggattatgctacattgtatctttgctctcattagtttcaaagaacttcttgatttctgccttaattaatttttttacctcaaagccatttaggaacaagttattcaattttcatgtaattgtatggttttgagtgaatttcttagtcttgatttctaatttgattgtgctgtggtctgagagattgttatgatttcagttcttttgcatttgctgaggagtgttttatttctgattatgtgatcaattttagagtaagtgccatatggcaatgaaaattgtttttgtgtggagagttctgtagatgtctatcagatccatttgatctaatgctgagttctggtcctgaatatctttgttaattttctctctcactggtctgtctaatattgtcattgggtgttaaagtctcccactattattgtgtgggagtctaagtctctttgaaagtctctaataacttgctttacgaatctgagtgttcctgtgttgggtgtatatctatttaggatagttagatcttcttgttgaattgaaccctttatcatatgtaatgcccttctttgtctttttatctttgttggtttaaagtctgttttgtctgaaactgagattgcaactcttgcttttttctgcttggtagatttttctccatccctttattttgagcctatgtgtgtcattgcataagagatggtctcttgaggacagcatatcaatgagtcttggttttctaatccagcttgccactcagtgtcttttacctggggcacttagcccatttacctttaaggttaatattgatatgtgaggatttgacactgtcaccataatgttaactggttattttgcagacttgtttatgtgattgttttatagtgtgactggtctatgtacctcagtgtgtttttgtagtgctggtaatgctttcctttccatatttagcgtttccttcatgagctgttgtaaggtaggtctggtggtaatgtattccctcagcatttgcttgtttgtaaaagattatttctcctttgcttatgaagcttagttaggctggatataaaattctgggttggaatttcttttctttaagaatgttgaatattgacccccaatctcttttggcttgtagagtttctgctgagaggtctgctgttagtctgatgggcttccctttgtaggtggcctgacctttctctctagctacctttaacatttttcctttcatttcaaccttggagaatctgatgattatgtgcttggggatgatctttagtattagtaaaaagaattttactggggttctctgcattttctgaatttgaatgttgccctctctagctaggttgaggaagttctcatgcatgatgtcctgaaatatgatttccagattggttgcattttccccatctctttcagggacatgaatatgtcatagatttggtctctttacataatcccatatttctcagacattttgttcattcattttcattatttttctctattcttgtctaactgtcttatttcggaaagccagtcgtcaagctctgagattattttcttcacttggtctattctgctattaatacttgtgtttgcattatgaaattcttgtagtgtgtttttcagctctgtcaggttggttactttttaaaatatatatatatactggctgttttgtctgtcagctcctgcattattttatcatgatttggagaggtgatgcagtcatttggaggaatgaaagcacactgactttttgaattttcagggttcttgcactgacttcttctcatctttgtgggtttatctaccttcaatctttgaggttgctgaccttcagattttttttttatcctatttgattatcttgagggcttgattttggtataaggtggattcaactgactagcttcatttctggaagattttagagggccaacattcagctcccaactcctgcactgtgtactctaactctgggggacttctattgggccccagctttgttctttggctccccaaggttaggaatccactgcggtgaaggggcctgaggtgtggcagctgtggcagagtgctagcaggtgtcggggtgcctgcctccatgtgggtgttcaccacagtggcagaaacaatgcagctgttgggggagctcctgctggcaactatatgtatggttgtgctggacatggtgttggcttgggggtggggtgctggcagatgcaggcctgggtgccttctctgtgccccataagcaggagtgattggtcagcatgggggaggactgttgttctctgcaaaaatgtttaaaaaagaaattgtttcaaaaatctatataaagctttggattctgtaaatccaaaattcattactggtttattactttactggccagggattatggcaccagaagagagatctgtggttctgacaataagccatgaatgtggtttgcccagtacatggtttagctttgtttctgtatcagacacgctagtttaatttacaaatggagttttgatatactcaggactgtgaataagtattggggggtggtgtctggtgaaaggcagacaaaccacagtagctcatttccttttattgatccgagcacaaagcattgttgttgcatcttagaaattaaaatcctcatttacagaatagtgtggtgcaatctggaaagatgttgttgtggtctctcaggagtgaataatatgagtttttaaacattttccaagaaaaatttacatgatttcaaacattctaaagcataaggatgtacagtatttcttacagtagaggaaactgccaaatattttggaaaaatataagaaaggaactgtacattggtaagaatgcattttcaaagactatttattttgtttgtttttaactgaacagttattcattgagaggggtgtgtgtgtgtgtgtgtgtgtgtgtgtgtgtgctgaagatagtattatcccaaataatcatattatatagaggctacaactcagtcttgcaaactgctcttacttgcaactgacagctacctcccacaccctcttggcatttctctagtgaagctattgatgtaattattgcttttagggttctgtattaaatttaaaaaacaacttcttttaattttgtgcttaatacagaaatcctaaaaaatcatagaaaaacacaaaggaaaaaaatccagcattaaccactaactaagtggataactaagatcagagaagaaactaaaacaagtaactaataactaagatcagggaagaattgatggtgatagagacgtgaaaaatcctccaaaaaaatcaatgaatccaggagctgttttttttttgaaaaaattaacgaatagatagaccattagctagactaataaggaagaagagggagaagaatcaaatagacacaataaaaaatgataaaggggatatcaccactgaccccacagaaatacaaactgccatcagagaatactataaacaactcgatgcaaataaactagaaaatttagaagaaatggataaattcctggacacatacaccctaccaagactaaaccaggaaaaagccgaatccctgaatagaccaataacaagctctgaaattgaggcagtaattaatagcctaccaaaacaacaacaaaaaaaaaaaaaacaagaaaaaaaacacagaaaaacaaaacaggaccagacagattcacagattcacagctgaattctaccagaaatacaaagaggaactagtcccattccttctgaaactattccaaacagttgaaaaggagggactcctccctaactcattttatgaagccagtgtcatcctgataccaaaactgggaagagacacaacaaaaaaagaaaactacaggccaataagccaaataaacattgatacaaaaaccctccataaaatactggcaaaccaaatccagcagcacataaaaaaaaaacttatccaccacgatcaagttggctttatcgctgggatgcaaggctggttgaacatacgtaaatcaataaacgtaatccatcacataaacagaaccaaagacaaaaaccacatgattatctcaacagatgcagaaaagacctttgataaaattcaacattcttcatgttaaaaactctcaataaactaggtgttgatggaatatatctcaaaataataagagctatttatgacaaacccacagacaatatcatattgaatgggcaaaagctggaagcattccctttgaaaaccagtacaagaccaggatgtcctctctcaccactcctgttcaccatagtattggaagttctggccagagcaatcaggcaagagaaagaaataaaggtattcaaataggaagaaaggaagtgaaattgtctctatttacagatgacaagattttatatttaaaaaccccatcacctcagcccaaaaacttcttgaactgaaaagcaacttcagcaaagtctcaggatacaaaattaatgtgcaaaaatcacaagtattcctttacaccaacaataggcaagcagagagccaaatcatgaatgaactcccatttgcaattgttacaaagagaataaaatacctaggaatacaactaacaagggatgtgaagacctcttcaaggagaactacaaaccactactcaacgaaataagagaggacacaaacgaatggaaaaacattccatcctcgtggataggaagaattaatatcatgaaaatggtcatactgcccaaagtaatttacagattcaatgctattcctatcaaactaccattgatattcttcacataattagaaaaatcgattttaaatttcatgtggaatcaaagaagaccccatatagccaagacaaccctaagcaaaaagaacaaagctggaggcatcatgccacctgacttcaaattatactacaaggctacagtaaccaaaacagcatggtactggtaccaaaacagacatactgactaatggagcagagtagagacctcagaaataacaccacacatctacaaccatctgatctttgacaaacctgataaaaataagcaatgggaaagaatctcctattcagtaaatggtgctgggaaaactggctagccatatgcagaaaactgaagctggaccccttccttacaccttatacaaaaattcactcaagatggattaaatacttaaatgtaaaactcaaaaccataaaaaccctagaagaaaacctaggcagtactattcaggacataggcatgggcaaagacttcatgactaaaatgccaaaagcaattgcaagaaaagccaaaattgacaaatggaatctaattaaactaaagagcttctgcacagcaaaagaaactattatcagagtgaacaggcaacctacagaatggtagaacatttttgcagtttacccatctgacaaaggtctaatatccagaatctacaaggaacttagacatatttacaagaaagaaacaaacaactccatcaaaaagtaggcaaaggatatgaacagacacttttcaaaagaagacatttatgtggccaacaaacatacgaagaaaagctcaacatcactgatcattagagaaatgcaaatcaaaaccacaatgagataccatctcatgccagtcagaatggctattattaaaaagccaggaaacaatagatgctggtgaggctgtggagaaataggaagacttttacactgttggtgggaatgtaaattagttcaaccattgtggaagacagtgtggtgattcctcaatgatctagaaccagaaataccatttgacccagcaatcccattactgggtatatacccagagaaatataaatcattctactacaaagatacatgcacatgtatgtttcctacagcactatttacgatagcaaagacatggaaccaacccaaatgcccgtcaatgatagaatggataaagaaaatgtggtacatatacaccatggaatactatgcagccataaaaagaaatgagattatgtcctttgcaggaacatcatcctcaacaaactaacacaggaacagaaaatcaaataccacatgttctcactcataagtgggagctgaacattgtgaatacgtggacacagagagtggaacaatgtgcactaaggcttgttgtgggatgggggtgagaggagggaacttacaggataggtcaatagttgcagcaaactactatggcacacgtatacctaggtaacaaacctgcacattctgcacatgtatctcattgttttttttttttagaagaaataaaaaaatttcagtgttaatgactgtttacattttcgtgaattctttccaatatttgatatttatacatatataataaaattatatctacctacctatctgtctacctatctatctgctttctagtctccctttttcttttacttagctcagatcatgaagatttttttccatgtcaataaatatatttcttctcttttctttttcttttcttttttttttttcttttttttgagatggagtctctctctgttgcccaggctggagtgcagtggtgcagtctcagctcactgcaacctccacctcctgggttcaagcgattctcctgcctcagcctcccaagtagctgggatcacaggtgcccgccaccatacctggctaattttttgtatttttagtagatacaaggtttctccatgttggccaggctagtcttgaacacctgacctcaagtgatccatctgcctcagccttccaaagtgctgggattacaggcatgaccaactgcactcagcccaataaatatgttctataatacgctacttaatgatacctattacattatattgtatggaagttccattacttacttaatctgttcttcctggacatctgatttttctttattgtaaaatgtgacatcttaaacatctttacatattcatcttcttccacgtctttgattacatcctttgtatagctcttagtagtgtttttgctgggtcaatgtttttgtaaataaaaaaaaaatgttaaagactttagacatgtataaccaaagtgccccagcaagagattgtaatccgcttacactgcctccaggagttttttgggagtacttgttttttcctaccctctcccaccagataatatgattctttttaccatttttaacccattggataggaatatattttcatgtttttatttgcatttctttggatttttgaggctacgtattacaaagctgttattttaaggcataccagagaacatgaaatcttattttatccatattttggttttatccatttgctttgaaccccctgaatcagctgccctgatggatagtttttttttttttggtgtgggcttggccatgatggggaacttggttgaaagatgagtgaagttaaggcagttcaaggatgtcatactttttagaagtaccagacaatcagaaaaaagtacagaataggagaaacaaagaaatcaaatacttaaaaaatatattcccccaggtcaatgctttgccatgaaaaggagaaaaaacagttctttctctctaagctgcagtaccccttggtcactgttccaaagcttggggcagaccatttgtcctatactatggctacatgtggatgaagtcatttttgtgtggtcttttaagactgaaggtactaatcacaattttaacattgcttctccagaaaaatactttctgagttacgaactttggggacacaaacctattggtcatttggagatctagtttcccttttatttttctaaattaaacattaaacaagacaatctgagctttgcctttttttcttttgggtaacttgatttcccaattataaataatgattatttaatgtctgttaattctttcacagtttagggtgaattctaattagccatctccctaagatatgtggtttgtggcttgaaaagttttctaatgccttccctccctagaactaatgactcagaactgagaaagactgacacagagcttcatcttctgctggggctgcaaatgctctggagattgcccacgccctcttgcagccactgctagatgaagatgaaagcccactgcccagacggcatcagtatttcacctgctcagtattgcacagaaaagtcttggtttgacttacagcctgctcattgctggaaggtcacagcactgttttttgatggagttttgagtagtcattttttctagtgctttaaacagattaaaatgtggttttatgggtagtcatttcctagatgcttgtgaaaacaattctaatcctaattgatggtagaaactgattcggagactcagtaaagaaagacatctgtgacgttcagttcaaaatagttaattattgattgatcacccaccagcattagcttatagatacacctgaggattaaacatgactttctggaacaaaataacttttttttttcctaaacataatgtacaagctgagcttaaatgagtgaaattataaaaggagataatctcaattttgccctatataagaataaaatatcagtcaaaatatttaaagaacagagatttctgtttggtgcaattttctggttaagaggttaatggaggggaatggaaagttattgttttatggatgcagaattttagttttataaaagagttctggaggtagatggtggtaatgattgcataacaatgtgaatatatttaataccatttagctgcacatttaaaactggttaatgcctggtgcagtggcttgagcctgaaatcccagctcctcaggaggctgtggtgggagaatcacttgagcccaggagttcgagacaacagtgagctctgattgtgctactgaactctagcttaggcaacagagtaagacgttgtctattaacaaaaagtaagaagaaaagaaggttaagatagtaatttttatgttatgtgtattttactacaatttttttttaaaaaagagttaaattggaaacaaaagtcttttaagagccttttggtctgagctttgacttaataaatacaatattaaatgaaattgtgcatttactaaatatttgagggacattattctggaagccaggtctcattttctaggactggagaagacagaatgtgttttggactcaggatgtgtttgtgaaagagcttaaaatttctttaggtgattgtgcattcctgtgatatgcattttctccaaaatgtacagaaagaaaaataatttgaaccctaattaattgggttctaattggtctgtgttttaggctctaaaggatcttagatcctttagatctttattaaatactggtaattcagtatttaattgtaactgatttttatgcaactgcgcaggagaagaagtgttcaggtgcagctttcttcccatccgtgccttccctaggccattgtgctttgtgttcttaagactcggtgaatgtttctgaaggtcagctagagtgcagaggagaattaatattaaaatgcatttaataaataagctgtcagatgattcccgaagataccataagcagcagaaagtcttctttcctctttcattcagatcgctgtgtacagagggaatgatggttaatatagtctctgttggcatctcctaacgggctttggtaatcatttctagcccagccgtgctccacggatttcatcactcttgagtgacggggccattttctcacagaatatggaccctccctgaaaaagagggagcagaaatagtcatctagcagtgtaacagttagggaatagaaagaaaatgacggattttgcagagaaggtctgcagaaactgatccagcatccctggcagtttgagtagagaatgggattttggtctttactttgaattgtcataattatttaatgtcaaacctatggagtgttatgaggctgtaagattttgaactctgtgcccttcagaggctctgcctcaggacacaaacacaggaagattaaacattaattaaagtaaccacacaggagaataaacaatgtaaagaagtagaaaaagacctggcttccccaccagggtaagccattttagaaagagagattttgtattgaacttacgagatggatgaaataggcttcactagacccaagggcatggagtaatttctcaggaaagtattctgccattgattcctggaagaaaaattagaaaaactcagtggatgatggaccaacccagaggccctaatggtacagagagaaaggaaacatgaccatgttcaagttacaagttgtagctgaccttgatgtttatcgccagaccgtgggaggttttggaatctgactgatgtctttcttccctgtagattgttattcagtgcctcggatgtgggcctaggaacctgtatttttaaaagattatctgatgtacagccgggtatgaaaactactgatcaagatcaatagttttaattaaagtcagggtggagggagtaggagggagggaaagacagagggagaaagagggacaatgaatgagctttggattcctttgttcaaatatgatcatctgagaaagagaaattctgaactgtcagtcggttcagagcagagctctgctggctgaattggatgtgggagatttttcttaggttcccagggccacagaaaggaagcccatgctgaataatccagatttaagccttacccattggccttggatgcctatttctgtcttccttgtctactactgtcactgtcaaccccttgtggctgttccatccccatgtgtcagctctttgtgggctggtttgcccccggaactattgctctgagttcttctgtccattccctgctcggctcagtgggctcctgagttagcctttagcatgtcacctttctggcatctccatggtaccagaacctttacttttcacgtgggctccaaccagcagcagctcccaactaggagtgtcccagcctggtggaaaggactggacacacaagatgggtcggaattgaatattaaatgaatttcaatacttggtgtacctttgtgaagtagcacattgattttgagagagcattgactttaaatctgatagatttttttgcaagcttcttttcagcaaatggcttactgtccttccatttgctgaggtcaaactccttggagtcattcttaattcctttctgtttttcacaccccatgttaaaatagtgaatcccttaacatatgtaaagaagccatctctttcccccacctccattgtcaacatctgggtctgtgtcaccaccatgtgtggcctggattattgccacagtctactaatttgtctaccagtttctgcccttgttccttgagtcttttcctaacatagtcatgtaatgatcctttaaagatatgactcaggttcctcccttttactcagaactcctgtctcttagagtgaaaaccaaagactttatagtgtcctacaaaaccctccatgacatggtgtttcccatcaggatctaccttgatcttagccaaaagcccaagaagcgatcttatcctgatctcacctcatctccaacttatttgcccttcagtcactctgctctggccataatttcctcctttactcacttggccaagcatgctgctgcctctgggcccctccctcatttcctctggctgaaagatgtttttgtaagttaggtatttgtatggttccctcacttttcttcaagtctgaccaattttgccttattagagtcagtttcagacctgcctatattaaaatggaacccctttgttaatttcatatactgttttccccttaccatgctttacttttcttcactgcacatttcatcatctgacattccactaatttattttattggtttattatttataaagtgctaacaaatactttaatccaaactctttgggggcagggcccacattttgtttactgcagatccccagtgtttaaaaagaacctagcacatactaggtgttcagaaagtatttcttaaacaaatgtattattagtaaatctgagttttaaatatagttttgtcacttcttaattatgtgacactcagtaagttacttctcagattcaagttttctaatgttaaaaataaaggtaacttccgtttcatggagttgtttttcagagtagaactaacgtttaatcttcccaactaaagtgtgagatcaaatttgcactaaaaatatgttattattattgctgttgatgccgacgggagacagggaaatactgggtggaagagggcggttcccttacaaaggctccaccctcaagcctggatatccctgtccccaagtgagaacagacattcctgttttcatgcacaaaatgttgccttttagcccaccatgccccctatcctatacccatataaaccctgaaccccagactccagaagcagatgaggagacgaacagatgagaagacgagcagatgagcagacaaatggcagaatgttgcagcagagaaggagagaagagaaagagcgcctgaatgtcagcaggagtttgtctggagatggtcagaaaatcaggtgctggatggccaaactccaggggaagatcatcttcccattccatctcctgtctagctccccatccatcctgctcagagccacctccaccacccagtaaaaccccacatgcaccatccttcaagtctgtgtgtgacccggttcttccaggatgctggacaagagctcaggatatgaaaggtgtcacgctggccctctgcccttgcaaaaaggcagagggtccactgagccagttgacacttaagccatgcgtggatggcaaggctaaaagaacacactgtaacatacacccaactgggctccgggagtcacaggctcccatccctggacgctgctgtggggccagagcccagcatcccaacccctgcacctgtccgtctgcatgctcccactcctgtaaggggtttgagcgatggtggtgactgaacagacaagccaaacccctgttgcaggtcctgtgagagtcagggaacccccctgtttcaccgttgttaatattgatagagctttaagactgaatttattcagacatggatagaatttcaatggaagtggaatccaggaactggctttaatcctgtgtgacttttctagaaagaaagtcttgattgcctctattttacttctaaaaaagtgtaggctacctgctaatggctcccagatttctgcttgaatgatctttgaataagtaaagacgttttggatgtaaattttcccattgttcttaagcaagtcattaaaattaaatataactatgaatggagagtgttttattctttcaattacatagggtttgtgaagagtcattctttgtctacttatatttaatcaacatgcaatattttatgtgccttattaccatgtgttaagaaggtaatattcacgttacctagctattttttacattagccaaaaaaatatggttatgtgcaaatattgtgaagaacatgcatgcaagtagtttgcttattaaccaggtttggtgtcagccacacacttataaagctaataattgctagctattaatattataactttagttcaaatattactgatgtctgttcttctaagactgaatgttaagattagaatttagaatttagtacaagtatgtataaatcatttcaacagaaaaaaatgaatgcaaatcaggaaccagctggaggcagatttgcatgattattttaatgctgtgacaggacgtgaacactcagaaattcgaattaggatgcttatttctcatatctacaatgagcactgagtctctcttatgatgtggccagctatcaccctgtgttatcagcaaaccctactaatagaaatttgagagtctaatatcaaacttactcttcctatttgttttctctgagccctgggttagaagactgatatgaaataagcatttttactatactgagctatacttatcatttacattattggtgttgcttagaaattactccacaggttttcaaaagataaatcatgccatttgattatcagcaaccatttgtccaatcagcacccaaatgcagtgtactctttgcactgggcagccactcttaagagagatttaagaagtaacaaggccatttttgtggataagtctagacaatagtcttttctgtagcatgaaactaatatctggtcttattgcatgatcatttttcttgcacctgctaaatcctttagtgccattcataaaacttttcataagaatgacttcatagaagtttctattctttttagagatatgattacctatctgctttcagtttacactattgcacttgtgtgtgtgttgtggggggtatcctctggtcttgtgcaattattttcattttagttactcaaatgaattgctgattaaaaagtaaattttgatggccatgtaaattggagatgattctggcttaaagggataactaggcaggtatttttgaaaattaataagcaaggctatcactccacataaacaaagcgattttttaaggaacagaacacttgatatactggttgatgcttcagtctggtgtggtatttgaagagcataaagtcgtaacatagattttcattttaatgggagtgttgtaataccttcataattttttttttttacttctcattagtttttacaacctacgaattacctaaaacaactttagtcatttgaattttgacttgccacttattttactatgtgcaaaattgtcccatttgagaaatggaatctgtatgtatggtattggtgtctatggctagacattaggactattacagagtttgcagatgtcactatgtctaatgcagttctaatgcagatctgtttggggttttgtttaatatatggttatggagaagtctagaaaggaatgacaatgaagtagtagttactgtaaatcttgtggtcacgtaatgaaaatttaggagacttttctgtacaccactttagctctgctctttgtagattgactcatctagaggagattttgtacaaatttttttcagctaatttctccagttcatttgtttattgatatagtattacattattatttagttaagcaaatggtctacaccacatgacttcaagcctcaatgtcttcttttttgttgttgatttgtatactaaatttcagaaatggctttttatggggaaggttggagacaaataatgactatatacacatatatttcacatatatatgttattgaaacatatgagtgtcatatatgtgtaagtggatgtagacaagtaatgagtatatatacatatacagtcatgtgtcacttaataacagggatacattctgaaatgcatcattaggtgattatgttattgtgggaacatcaaaaagtgtacttacacaaccctaggtagtagagcctactacatcatacctaggctatatgttatagcctatgacccctaggctacaaacctgtacaacatgctactgtactggatactataggcaattgtgacacaatggtaagtatttgtgtatctaaacatatttgaacctagaacaggtacagtaaaattatggtattatagtcttatgggatcagcattgtatatgcattctgttgttgaccaaaatgtagtgcatgaatatatatatatatatatatatgtatgttactgaatatgttatatatttgttattgaaacctacttttattattatatatatacatatacataaatacatagccccacttcttcagtcatgtgaagttacgcctactgatacgtgtattagtctatcttgtttcttcttgccacttttctctctactctgagcccattcacgtaacccattttaacaattacttatagattatttcataatttccttattttagttcatttctaatcattaactgtgttattgattaccccttatgtgaaccaaaaacatctccataggggcatttctttgagaggatcagttctgctttattaaaggtaagtcagcttatccaagtcaccagaactgagttaagaaacatatggggctgggtgcagtggctcacgcctgtaatcccagcactttgggaggccaaagcaggaggatcatttgaggtcaggagttcaagaccagcctggccaacatagtgaaaccctgtctctactgaaattacaaaaattagccgggtgtggtggcgcatgtctgtagtcacagccacttgggaggccgaggcaggagaattgcttgaacccaggaggtggaggttgcagtgagccaagatcgtgccactgcattccctcctgggcagcacacacacacacacacacacacacacacacacacacacacacgaaacatatgggcaatccaggggattctagctcttcagagtttgcccgggactaaaaatggcagtacaaaattgagcattggccctttgagatcactgggagcaaaccaaccaatgaggaccacccatgggaacagatggagttcagaactggactttaaatcggggctcactctacagagggtattgtggctggacagaggatgctcattgcatgaaaaggaatctgtttgtctgggtcagtggggaagagttctggtgtgtcagactgtcttattttgagttaaaagttttacaggtaaagatttgctttaattttctactcatgttgtccagtcgagtatggccatgtgtgcttctgtctctgatgagaaataataatgataaagatcatgagagcagcaggtaccactctgacaacgaagtgcccttctctgtcctagttattttaaaggtagcacattttttttaatcctcgcacaaccctgtgaatccatattgctttcttccttttacagataaggaaactgaggatcagagaggaaaaccaacttgctcaaggccaccaggctagttagtgttagacccgagactcaaatctaggactgcaggacttcctatcccaggtcaacgttatctagtgcttctcgacattttgagatcagtttaaatactccttattgtgcttttcttgtggatctgcaggcactgggtctggcactgaggaatcagcgatgaccaagacttggtccctgcttggagaggttcacaacacatgcaccattttattggaacatcacattacattatgtttaatgtgacataatacgagctccagatgaggagaccttttctttattttgttcttaaaacagtgcctggaacatagtcagcactcaatgaacatctggaaaacataaaatatgtcacgaaatcctgtcatggaggaaagcactctttgctttgtctgtggtttcatctgtgcctcactctgaattttactctgggctcctcacccctgatgcatttgcccacgacctcctggcatgccttgctgcccttagcattcattctgcagaaactttatggagcacatactgtgttctgtgcatatactgccagcattgtgctggcattagggacacagagacgaacagaccagacatggtccctgccctcttggaggaacacaactgctctgtacccatgggttctgcatccatggattcaactaaccttggatcgaaagtactcagggaaaaaaatatatgtctgtactgaatacatacagaccatttttccttgtcattaagtctgaaacaatacagtataacaagtatttagcatttatatcgtgttaggtattataagtaatctagagatgatttaaagtatacaggaatatgtgtgtaggttatatgcaaatactatgccattttataacagggacttgagcatctgcagatttttgtagttttgggaggtcctggtaccaatcctccacagatatggagggaccactgttctcttatacccagttctccttcatggttcagaatttagctcagctcttcacccacacacattacactcttccacccactgccccatgtcattaataggattgattcttaagtgtgtgaatggcagtcagagcccatgcacctcaactctgacttgaccagatgccacaccctggagtttctccataaagacctcctgccgtggattctcatccacttctttgagcatatggaatgtccatggtggaaagaagcagacaggtctaaataaacccattgactactgagaaaagaattaacgtgtatgagacccccgactatgtctcaggcaatattctagggcttttcctccttcattccattctcatagtaatcctgagggaaaaaaaaagcagtattttctttgtttttctggatgaggtccactgaggttagtggggtgtccaagcttggagagctagggagtagtagacagccgagataaggaatgcaggtccgtctttgtacaaacctgcttatctccatacaaacctgccatgtattctcaaggttatgagagaaccagggagggctggagactgagctgcctggtggtgcctatttatattcatgctctggaaattgtacatgtaactcattactgtggtcatctgctttctgcagcctcgtgaggggcccttctcatgttcctctgtagatttatgagcttgtacatggcacctccattctacggcagtttttagagttccctgaggattcttataacaatcacaattatttaggttctaaattacccttgtccagtgttaagcagatgagcagtgttttcaccttctaaacaatgattcctgaggcaactgctgccataatatcacatttcgtttccaaggaaactgcatatccatcccttcctcccacccttcccacttccttaagcatgagattttttaaaactcaaaatgtgccatttcaacctcttgttactgtgaaagttttagttccggcattggttcctaggaaattacagttttccttctgatcttcttcttaatgtgttggatgcttttctgcagaaagctgtgcattctaaatggcattgaaataaattactgccttcattatgacacacaatagatgaatgtattctacttcagagtcacagcttctttagccaaaataccttggttgttttccatcctgaagttctataattgcttacttgatattccattgtgagatctcagaataaagtaaaggtaggctgtggtatatatgtgtcttttactctcaggctgtacgtgcattcaagttacctgactggatggattcagtaagtttgtaccctccagataaagtaattactgaaactaagcatccattttctatagattatgttactagtgactaaaaaatatctccagatattgtataaatcatggaattcaggcagctatgtttactacaagtggcagtgaagcatttacttactccaaaggaactctggagtactttgcaatcctgctggaaggcaggggagatgtgggtggccacacagagtcagaggatgtcaacatgcagacatctgtgtaggcatctgagttatgctgatcgaagactctcttctcactctttagtttccccactccaaacacacacacacacgcacacacacacaaacacacacaacctcagaaaaccgtggtgagcagccctgtgtctacagatacccactcctggcaatgtccatgtagctaacttccggtcaccatgtccgtcccaggattgccttgagcctctatacctccctccagcctccaggcttttgatatagagacctagacatttggattttgtttttgtttttttccagaaaatctctctgagactcaacgcttaggtaatgtggaactcagaacctgactattttttttcaaagaaaggagcagtcatgaacagcctatgaatagatataagtagatgcagaaataatctgtatgggccaggcgcggtggctcacgcctgtaagcccagcactttgggaggccgaggtgggtggatcacgaggtcaggagttcgagaccagcctggctaacatggtgaaaccccatctctactaaaaatacaaaaattagctggttgtggtggcgggtgcctgtaatcccagttactcaggaggttgaggcaggggaattgcttgaacccggaaggcggaggttgcagtgagctgagatcacaccactgcactccagcctggatgacagagcaagactccatctcaaaaaaaaacatctgtatgtatttagtaggtaagggtgaaaatgattattatagtgtgtgtgggagtgggaggaaattagcccatgtactattggactggtgatgtttctaagggattgttgtatatgcgaaattgatcttccatttacctactcttttaagcacttgggcctggtcagttgacaaggtaaagttgacccttgaacaatatgggagttaggggcactgatccctatacagtggaaaatttgtgtttaacttttgactctcccccaaaacctaactataatagactactactgactggaagctttaccagtaacataaacaattgattaatacataaaaatgttattaagaaaaccataaagaaaataaaatgaattcattattcattaactgccagtggatcatgataaaggtcttcatcctcattgtcttcatgtagaggatgaggaaccagaagaggacaattggtcttgctgtctcagggttgtcagaggtggaagaaaatccacatattagtgggcctgcacacttcaatcccatgctgctcaagggtccaaaggaactttggagtactttgtaatcctgctggaaggcatgggagatgtgggtggccacacagggtcagaggatgtcaacatggagacccctgcataggcatttgaattatgctgtactagcttctggtgggcagcaggcctggagccagtctctctggtagagttggatggggccaagagggtataagtcttactccttcttcccataggagaatggaaagggagcttccttaagggatcctggccctgcagggctgtatggtctcacaggcaagggtgcctatctgctgggagaaaatgctttgtgtgctcatattcatgcaagtaagttcttagattattgtcttacataaagtgatttgtaccctttgcctatggttaccaccaccacccctgtgataagtccatagcttcccaaactccaggcacatagaacctttctgccttttttggatccacctctgtatgcagtggctctggacttcttggtgtccccacattggtctgggctgaacctgacaggccaatagacaagggagtgaactatggatgtactcaagttcattaagtcacacgtcattgtgcttagtgaatgtggcaatctgagacaaatacgccctttgatgaatagagagtagaatgactaataagagatcagaagccagcaaagagtaaatccaataacaacaacaagaatgtagagtttgaaatttcttaagtttaaatgagaatgttagcttattttgcaaatagctttgtctttttctgacccctcctcccaccatgtggaggtatggaggagagaaaggctcttgcagaaaagtataagcggtgcaagtggagagtgctgcagagatggagatggaggccaggtctgctggtgaagggtcttatagtccaggctaagatgttaagcataccttagaggcatgaaagaatctctgagggccattaagtggggaccgaaattctaaaagctcaattcttagcctggttgggggatcaatttctagttattggatcacagtggactgaattctgagagctcagtgtgacagataaaggaaagtttgtcagatggatactgttttctttataagaatcttctgacttttggggtagagtttaacccctcattttaaagcaactcattatgtctcgttggtatttaatgaaacgaaaataatgtagtatgtgacactcatgacatttcacctgtaaagtaatttatggtaatttgtcctagagtgttctatcataggttgataggattcaaggactatatacttgttttctaccctaatagataggagggtggagtaggatgagaggcaggctcagagataggaagaaaggattttttcatagcaatgcaaaactgttagaaaagtgcatggtactccaacctttcagcctagtgacttcttgctgccgtggagtggctgcagtttccttctttgcaagtttggagcatacgcccagatgctggaaggatttggtttacattatattgaaaaataaaacaagacaagtcaagtaaaacaaaacattagcaaataaaacccataagcaaacacaaataaaatgatttagtgaggtaatttctcacaaatttcagaatttcccacaatcgtacagaaatggttcttgcctgtggctcacatgggcttcaagaatttaatttacccgtgttgatcagatgtgtaaaataatggttccatcattggttgcaaaaacttcaggtgttggattttggaagtatttacttacagaggtctcatcattgtaaggtaaagctttttagccatccaggccaaatggtgggattgagattccatctgccattgttcttacggacatctaaaaagagcaagaaaggggtttttatatttatttgatatttatactcccatccccagaagcccatttaaaaattggtattggttctggtagcagaaaaagtggaagtgaaattagagtatagaaacttatttctcaaagtgtggtctgcagactggccacatcagcatcacttgggagcttgttaaaaattcagagttgctggccccacaccatctcactgaaccagaaactgcattttaccatgatcctcagataatctgtctgcacattaatgtttgagaaccactgaatggggaatacctttttaggaagcatggtcatgaagaaagtggagtggttgtggagaaggtcctagctagagatggagcatgaggtcagggcatttgtttgtcttaaaaaaatttagacaagccttgagcatgtttatacttgtggagaaggagacctttgaagtaaccagacaccaaaagacaaataccatatgatctcactcttacgtggattctaaaaaaaaaaaagaattgatatcatagaaacaaaccgagtagaaccacagttactaggatactaggaattggggaggtatgggaggcgaggaggatggggagaggatggtcaacaggtacaaagttacaattaggaagactgcgttccggtgttctattgtacagaagggtgacagtggttaacagttaagatgtgatatattataaaatagctagaagataggcttttgagaatgtcctcaccatgtataaatgataaatacatgaggtgatggtcatgctaaataccatgatttgaccattatacaacatatatatgtatcaaaacatcaattgtaccccataaatatgtaaaattacaatgtgtcaactaaaaaataagaaaagaagttgaagagaaagaagaggtggctgaggtccctggggagctagagggctgagatgtggtcataggagggaaagtagactaaagtggatgaatgacacttgttctcctgaaatgagagggaaggaagagcgggtaggctgcatgtaaattagcttgtgtattgaggaaactggaaaattgagagtagtaaaaaatggtgacttatttttaccgatgatggaggtggagtcactttttgagcataaaggggcagacctggtcatgggatttcagaaaagttcagggccccttagaaaaacacactgatgggtatgggaaagaacaggtgggggtaagggggcctgagttataggttgctttggtctcccccttgtacaattcaaaacacctttcagatatgtagaatggaagaagtacccaacattgatgtatattaaattccagccctgaacatcatataattaaagaaactaatataatactgatataaaatgtgggactgttttgactgtattggtactttctttttcccaaaaaggcagagctgcttttgcatatgaactcattttcttcaaaatccattatcctcatgtgagagatgtagaattttgggcacagaaaacatgacaaattttgcctgtagtcctgaactgagattggtaccaggctctgctggcttccagctatttcatttcatgatttatcaagagctgctctctagtcgacttggaaaaagagtttttgaagagtcctgctctcacaggacatctgtgagaatgccgaaggagaaggtaaagagaggcacgcttcaatattttattatctcaacccacagccttaaaggtctcctcgattgtctctgcctacaggaaggctcagctgctttttatcattccgttggggccttgtttcaggggcttgtgttttggtaagaagatgttttgtttctgaggacagctggttaaaatgcactgccttaactggaatattcacaggtatgttcttctcggcactgtgaatcatttttcaaagcttttcatggcttctgctctttgatcaggataaatcatgccacagtgagactggaatccactttcatagactcccaggtgtccttgttctcacccactggtctttacttctctgaagagcctgaccttatgaattaaattctttccgattgtaacattagtcagaggaattggggaactggggacttttgtttattaatccttttatcttctgcttttttgcccagaaaggtcatttttcaatttccccagaaggtaattctacttctcttagtaattctcaacaaatgctaagcttaggacatttatataaaagccagaataaacattaagtttagaagtgtcatataaaaactagaaacaagcttttgtgcttctgagtataacttaaattaggtagaaaaaatatctaataataaaagtagattcttctaccctgtgtagggtccacaaaggaaaaaatatggcctcttctttttaggagtctagatcccactttctcaaagtgccttccttcatgtgtagccaccccacttccagtctacattggggacccccaccattagaaaatgtctttatttatttatttttaattgtcaaaagattgtatatatttgtcacacacatgttgttttgaagtgtgtacattgtggaatggctaaattgagctaattaccataagtaccaactcacattaagcctcccttctttatcttctcttagcgtccttgatttcctccacaacatttaacataactacggtatatttatttgaataaatattggtttaactgcttcctccctgccaccccagactctgagtcccatgatggcaaaagccttggtagctgtagtagatactacatatatctttgtggaatgaataataataatactagtggagaatatttgttgtgcttatgatgcaccagggactgggctaactgtgttactcatcctatcttactgatcctctgtcttagcctgcttaagttgccataacaaaataccatagactaggtggcttaaacaacagaaatgtgttttcttgcagttctggaggctagaagttcaatatcaagggtccagtgatttgatttctagtgaggactttcttcatggcctccttcttactgtatcctcacgtggtagagagagagtgaacaggttatctggtgtctcttcttacaagaaccttaatcttataggaccaggtccccacacttctgacttcatttaattttaattactttcttactcctaatatagccacactggaggtcaggactcccatagatacattttgagggaacacatagcaatccataaaacccacctaaccaccctaatgaagtaggcactatgatcatctctgttatacagatgagaccctaaggcttagaccagggagctttctcaaggtcacatgagtaagtgaacaagctggggcaaggttgtaggtcttatttactcaaatctgggttcataaagatataaagatctgaactggttacatatactttctgtttggaagaaatgtaatctgagatatagagtacgagcttaaaggactattatatatgcaaggaagaaagtttataggctaaaagagtggttctcaaaccttgcgttttaggacccttctacattcttaagaaaagtattaaggatctcaaaaagcttttgtttatgtaagttgtatctgttgatatttatagatagcattagaaattaaaactagaaatatttttaaatatttaatttatttcaaagtaataataaacccattacatgttaatacaaataatatatatttatgaaaaataattatatttcccaaaataaaaaatttaagacatttaagacattttttgcaactctgtctcaggtctgtcttaagagaagacatagatatggattctcacatctgcttctggatttactctgttgcaatatgttgtattggtaaaagtagatgaaaattcagcctcacacaaatgttattggaaaaaggaggagtatttgatcagccttttcagataattgtggacattctgttttgttactacagcaaaactccaattggtagttttctaaaggttagttgcgatgtgaaatctgaaacggaatcaatgaacttttcatattctgttactttgaaatccactggtctagcttgcactttgaatggatttttcactcatgcatgattttgtaacatcttgcattggtcatttgaaaatatcagttcactgagttaatacagatctttgagatgttgacacatttcattatacaatatccaaaaatcacattccttaatattaccactcaaatatctcatcagaaaaggctttatgtactgggaagctttcaagcccatgatggcagatgtgagttttacaaaatccgaatttttgcttgaaaacaaggtttttatcattggcatcaatgactattagttgtttttcttaaagtgttaagattatttcattcatttagaagaaaacatctgccaactgcccacatataaataactttacttggttaattttcctttcaggaaaaaattatgttcatgaaaaaagcaattatttgagtttgcaactcaaacaattgcacaagtgcttttccttgtgacaaccactgtatttacgtgtgtagtagaagtgctttatacattttcccatttcatcacacagaatattaaaaagaatgtgtactcaaggtttaataaaattaataattcttacttctccttcaaggacattcttaattgaaactagtatttattttattgagagtacctggctgtgaagagtacatggctgtgaagaacacatggctactagcacagtttggagccactgccttaatttgtgctaaggcgctagcaattttactgaccattgcttttgtatatttggtgcaaatgtcaacatggttaaaaaaataaaaggcaaatacactttagtattctcacaaagacagttttgaccttgtggttccctagtaaggtcttagggagctcctaacatcccctactccccaacattcctccaggatcaagggcttcttccatgagcatgagttctataaaggaagtcaggaacaagcatgggcttggttggactgtacagttcaagaattagggaatttgaaggagtatgggtgaggaatagggaagccattaactgaggttggtaagaaggagaaaggtttttgcaaggagtcttagagctcagaagctcagattatgaggtgatttctctttaaggaaaatcaggagtttctgtaatttgttgagacaaaaatgacactgtccatgtgtttccttatctgtaaagtgggaatataagagtattattattgtgtgaattaatgtataaacagcttagaacagagcttggcacacagtaggtcctatataagtgttattattgtgaaaatggagttttgctctagttatatgatgaattggagcagctgttcttacacttcagtcagcagcagaatgccttggtgggattgttaaaatacggattgctgggccttgcttctggaatttctgactaaggaagtcggagatggggccatgattttgcatttttatcaggttcctgggtgatactgatgctgctcctctgggtagcacactataagaaactgaatcacaggaattcacacaatgaatactataaatatcaatagatacaactcatataagcaaaagctgtttgagattctcaatacttttttttttttttgagacggagtttcactcttgtcacccaggctggagtgcaatggcgcgatctcggctcactgcagcctcctcctcccgggttcaagcgattctcccacgtcagcctctcgagtagctgggattacaggcttgtgccaccatgcccggctaatttttgtatttttagtagagatggtgtttcaccatgttggccaggctggtctcgaactcctgaccttaggtgatccgcccacctcggcctcccaaagtgctattacaggtgtgagccactgtacctggcctctcaatactttttttaaagagtgtaaagggattctaagatgcaaggtttgatgcccttttctttcctagctactcaacaagccaatgcctcttattcatatccatgtatggaaagtgatgtctacttattctttcacttgttttcatttaactttgctcaagaactgaagtttaccccgtgtttttatttttatctgaacaataagctgggactgtaactggttcagtatttatattttttctagcatgtcctattttgctgtgcctaattgctattaaagccagatggctgggttccaaaaacttgtctgatttgccaacagttttactcacctgaacaattttcactggctctaagctccctgacttatatcacaggccatcattgccacttttctgaacttgccagaggtcttagaaatgtagactagttgttaagattgctgatgaagatgtgctaaatgaagagtgttggtagtttgatgattaccaatgatgttgattttaaatcctacattcacttaacaaatatgtgtgtgccaactgtatgcaaggctttgtgctgaatgctgggaaccaaaccgaggaaaaaatatgcatggactctgattgtcagtctgggagacactaaatcaacaggcaattataaaacagtacaatgtcacaatgtcaagggaagggcaggaagataattgggctgaaggggggatctaatccatggggggcagggaaggctttctagggtaagtgatgcctgagctgaaaacttagaggaggctttgaattcgttaggtaaagaaagcaggcaaaaagcatgacagtatcccaggctaaaagggacagagtgtggtaagacctagaggagaagcagcacacaccactgtctttgagaagaagtttaatttggctggttcactgagtgtaggtcaagatggggatgtagaaggtaggaaatgacaagagggtagaaagattaggcaggaccctctaagcctttggggtttctcagccttagcactatcaacattttgggctggataattctttgttgatgtggggtgggggactgttctatgcattataggatgtttagtagcatctctagcctttgtcctaaataccaagagtgactcccatccctccagttttgacaactaaaatggtctccagatatttcaggtatttccaaatgtaccttgtggaagtaaaattgcccctggttgaaaacaactgttacagagttttgcctttatttatgtttttgttgttgctgttatttgtttgtttgttctgagacagggtctcactgtgtcacctaggctggagtgcactggcacaatcagggctcactgcagccttgacttcccaggctcaagtgatcctcccacttcagcccccaagtagctgggactataggcatgtgccaccacacccagctaattaaaaaaaattagtagatatgaagtcttgctatgcttcccaggctggtctcaaacgcttgagctcaagtgatcctcctgcctctgtttcccaaagtgctgggattacaggtgtgagccaccatacctggctttgtctttatgttgagaacagtggtgggcaattataagattttattcaggggattgacctaaccagatttataccttttggacattcatttatagtaacagtatggaaaatgaacagagggttggcagcatttgaggcagggaaacaggatgtcactgttgcagcttggatgtatctaaagaagtggctgtaggaatggagacaactatgtacacttaagatataattaggagatagatttaacagggtttggtggctaattggacatgaatggtggaggagagagaggaatcaagtctgcctcaaggtttctggccttggtcctgaagaagatagtggtgcttttcactgatgaagggagcacaagaggagggacatacttacttggaaagtcaggagaggattgctggtattttagatatgtcggatttgaggtgccttgtgacagccaagtggagattttcatctgtaggtagagttcggtttctggaacttaggagacagaactgagccaatcagcaactagagggtagttgaaactctgggcaaggctaattaagaaaggctccactgaatgggaaggcctggggactaagagccggtcctgggtgacaccaggtagatcatggcaagaggtggaggggctggtgaagaggagatttcagaggaggaaatctaggatgtggcagtgtcagacaagttcagaagagttagctctgtgaagagaagcaaagtttccatccatggctcaaattcttccctttccttcaacaaattcaagtttcatgtggttctagatgctcattagggttcttctgaaacgattggatcctccaagacatagaaggttatgactggttataaaaattgccacatttacctctggtataacccaaatagaagctctgcatcataaaatttagagttgaagacagatgctgtaacttaaaaggattgatgctgggccagactgctgaattctgtagaggctttataatggagacacatctttctaggcagatatcacttgtcacttccataaggaaaattccctggagttgatgagtagtagagctgtgcttctgctttataaaatccacttttgatgaaaaattaacattttaattcagaggtgtgtagctatcaccaaagggttatgatgtcatgtaactaagtctcagataccaacattgttcaatattgtataattttttccagagtggtatgtgctccagataactgacctttgaaggtagtaatgtattatttacatgaaactaaaatccagtgcattctaaatggctgtgatttatcatgaccattttgaaattgggtcctgtggccatatgctaatttgactcaaaggaaattctgtgctgtgtgcttggatttcatgcttaaaaaattcagcaatagtttcaatgctcttttaattaaaataagatgctttataacatttcccacatgatgtggaatgtactctgtagctcatatatgaattaaaacccttagaagatttacattttctggtctggcaaccttcatttttctaatttatgtgtcctgtttgtcctgaaggagttgggaagttgaaatttacagccatcccaaatgagagagttgagattcttgattaaatgagagcttgtttgtgtattcaaatggaaaaatgtgggtggacaaaattaaatttgtagtgggttatctcctgaacagttttctctttcctggtaatttcacactgcccaactatgcacatggtaagtatgggagaaaacttttttgtataataaaactttttagcagtaactgactggaccatggttgggcatctattccaagttattctgatcagcacctgcatctgagactttgtaattggctctatcatattcccagtatgccttttgtgtgtggccattttctgctatgtaaataggaaaactgaaaaatcaggtctgcagaaattgaagaatgaatggggagaagcaaagacaagcaacagagagaaagaattcccagtcattcctggtgcgctgcagtctccagtttctgtgagtttccaagacccagctcatccatgcctttggggtctttgaaagatccctctatctttcaggggtctttgaaaaacccctgtttatttcaaccagctcagatggttgcctgcatgtgggagcaatgaaataacctatattgcttagatttctattttctgattagatggtggctaccatgctatgtgtatattcttaaaacaagcccttgtacataaattagataatattggatggttttggttgagctggtctttggcttaaatgttattgacatttttctgaaaaaatataataaatataggacatgtataatctcacacaagtttgaaactatttaatagactcttaaaacaaaggaagggtgtctatgtagatgtgctgattggttccaggtctaggaatccaggccatttgcagtttgatttgtggagaaggaaaagagactacaatctctcagtggtggtaaggaggcaggatggagtggggaccagaaacgcctctgagatacaatgtcccaaggtccagtgtttttatgattgggaggaagactgctctaaaatctttgacatttgaagattattaataataaatgtcctcactaagttcctctgttcataggatagtaatacaaaacaaattgtaccccaatgcagcagtgtgaaaaaaaaagaaggaaaaaaggccaagattattaaattcttatgttcagactgagaaccagaaagcaaaagagagttaatcattgagttgtgtattagtctgttctctcactgctgataaagacattcctgagactgggtaatttataaaggaaagaggtttcattgactcacagttcgacatggccagcgaggtctcaatcatggtgaaaggcaaaggaggagcaaagtcatgtcttacatggtggcaggcaagagagagggcatgtgctggggaactcccctttatcaaacaatcacattgtgtgagacttactcactatcaatgagaacagcatgggaaaaatccacccccatgattcaattaccttccaccgggttcctcccacaacacatgggaattatgggagctacaattcaagatgagatttgggtgggaacacagccaaaccatatcacgttggaaactgaatgtataggtggtcctatggctagatgtcactgatgacaactgtttgcagtcttctgtgtctggaaaaaaaataatagcttccctgcttaggaagtcagaatataggcggtagggagaaaaaactgttaaaaaaaacttcaaagactggaataaactacatttttgtagagctactatattaaaatataagaggaaaaagaagtggaaaagccggggagtggaaatcgcaggcctctgcagaaaggagataaacaagtgcctttgggtgggatcatttgtgattgtaacagaaagacatacaaaaagacaagactatgtccttagaagcagagtggcaacttcaagtttataattactaagaacccctatgtacacagcatttggcatatgcaaaatatattggcagatgcattagtaaaatttaactatcgtaaagcctctgggagcattgacttggtaaagtaacagaatctccattaaagcaaaagtaatgaactgactcagcactcctgagtaaagtgaccagatgtcagaggtaccctgaaggacacagagggcaaatcaggtgtattttctggctacaatcggaagggtggcacagagagaaacaaaaccatgaatacatctttgatttcaggtttaactcaaaggcagtgatatttacctggagagcagaggaaagcattgatgcttccaagccaattctttaaagaggtgtgggtggagagtgtgtgtgcatgcatgtgtgtgtgtgtgtgtgtgtgtgtgtgtgtgtgtatgtacatacacacatatacaattagctccaaggctttaaataaattcaacacaagtatttattcagacctttgttgtgtaaggcctccaccaggtcctgggagggaatacatatgtgtgtgaagccctaagctttgtttaaataaagctaagggtcaaagaagagtgaagagcaccccacctccaccccaagttctctcccccagcctcttccagtcatggctcttgggaaaccctgcagtaggaacagatgaatgtgtgtataagtagttggaaagggaagtagagatgatacttagacaacataaatgagagaagtgtgaagtgtttgcagtcagagtacctattcccaatagcctgcttttcatgctgataaaaccattcaatcttggatgttgagttcaattttttgtcagtgaaaaatctgcccagagtcttaaaaaatgcaagcaagtcatctgtatatagcctcagagcattgtattttcaatgtactgatttgctaggtatatattgaagtggcctttggaccctgagtgttaaatatggagatctgaatgttcttcagttcattttaattgtgacgaaatcaactattgaggaagaacacacttcctgatatagtctgcagccttatagagagccaagtatgtcacctttaacatataattcaagttcatttgttctgattaatttgtggggagttgcaggattggaatttagaatattttaagtgaaattgttggattacggattaaaaaaattacaaaagtcaattatgtacaagttctgggctaggtcctagggtacatgccaaaggaatgtgaggatattcccagtcttcatttcagagcagagtcacctggagcattttagaaaactcttgagactcaggcagcactcagatcactggagggggcacttagctcaaataaatcagaatctgcgcagggggtgcccatgcattactcagttgtagagctccctcctcaccgggtgattccaagtgcagccatgtgtgagaactagatcaacagtctggaaagcttataaaactacttaacatcaatttaaatataaatctctgggcattagtctgcggttggtaagttttacaggctctccagatgattctgttgcatgtggaagatttagaatcagtggtatagaccctgctctacagatgattatggtcaaatgagggaaaaggtgacttgtgtattttttttggaaaattacaagaaagtttatgtttaaatgccaaaagaataaaagacaataaggagtgataagaaaatgcaagaggtaaatatttagtgaataaattaaaaatgatttgtatttagcatgtttattcagatggaaatagtatttttaaagtgtataaatttttagaaatacatttttattatatattttcactatgtattctactatatagatataaaattacctaataggtatacatattttcagggtacctgtgataatttaatacacacatataatttgtaaagatcaaatcagtgtaattggggtatccatcaccttaaatatatgtcttttcttcatgctagaaacattcaatttattatcttctagctattttgaaatatatcatagattattgtaaactgttgtcaccctactgatctatcaaacactagcttttattttttctatcaaacagggtgtttaatcaacttttatcaaccctttaatcaacctttgtttatccccttacccccactactcttcgtggcctctgctaaccaccaatctgctctctatcttcatgagatccactttttttttaattccccacagattagtgagaacatgcaattgttgtctttctgtgcttggcttattttacctaacataatgacctccacttccatcaatgtggctgcaaatgcctgagttatggctgaataatattccattgtatatatatatcacactttctttacccatttatccattgatgggcacttaggttgattccatattttggctattataaatattgttgccataaatatgggggtagagatagtagatgaaaacttaatcttcttatctgaagaattacttaaaattctaaagtagaagagttggaattgagaactagatagatcatttagtctctgatgatctgtctgtttgcagaggggagttgggtggaactgggtgctctgggagtactctgatggtagaaagagtcctttttattccactgtggaggtggggatatgtccttgggtgtggttttgagcctggatatccagaagcagtgtttctcaaatggcactattctgtatattcctattgcacgacgtgtatcttcttgctaaaatcaggcagtatcactatttttctatgggatgtggggaatatttgatagaaatattggtagaactttcttattttaagttttatttccataatcttctcttagccctttggtaactattactggtagtctcaagaaaatcgagtgagagataatatgggagatttctttagattttcatagcacttcatctgagtaccaatagccttggattcttatattaataacagtaccctaactcttagggttctttcgcagacttagatgaattgatatatgcaaatgtgcttaggaaaatgccatgcacatagtgagccctcagtaaatgtcagcaattctataacttcccttccactgctgttattcccaacgtcatttgcttcctgaactgtgggacccttgaggtcaggccagatcttttatctttatattccctgtctcctagcacaaggtttggtgcagtatcaacacccttcaacatgtgctgaatgaaggattggccagcttagatctgatttaaccctaaagaacttatgcagttattttaagagtattgtatcagtgtttcagtgattttctccctgagtgaaatgcttccaaatgccctgctatgttaacagtgcagagaatggctgctttagaagaaagagccccttgtacactcaatagtccacagcctccccctttaccttcctgatggtgggcaggtcactacatctccccatctacctccctgcttgcttagggttccctgacacacaggtcagccctgattcatcattccctacagaagactgaccttggggccaaaaggctggtggatatgatagaggggatgaggagaggaaatggatcagtgacattccagctggacacctgaatcccttttcaaaagagcatcttgttttgtccccttaggcatcccctaagggaaagttagcatgcagttatgaatgagaccctcgctgctgttttgatgttgtaaaggaggagggaaatctacaatggcattgaggaataatgcaagtgcatatatttttcctcccaaagaacccaaaagcatttccacctctatgttatctgatgctgctgattttatgcttcaaagaattgagaatgaatacctggcagtaagtactaaatctatgtgtggtgactgacagattaagcactagggatgttaaagattagaccacggatccccaaacagtgaatgtcagtgttattttccatcttgaaatggaatgaagttgccctcatgattcttaccacagccagcactgttatatcctcccaatttggttcttacattacttcactcttcagaacatcattcatttatttaaatggtatttcttgagctcttttcatattatggcttggttctagctacagagaaggatataacaaaatgtgagacatggtctttggacccaagaagcttctatttcaagaaatggaaaaataaggccgtaaaagtcatgattacgtgcttaagttctatgattccatggtgaaaggatattttgaagtacagggaacagcacagaaaataatgctacctttcaggataagtctaattatacctcttttgttgtcagcctgtgagagctgagggtttgtggcttttaattctcctttaggctgtggaaggcagtgggggtgcggaaagagtgtgaccattagagttagttctggattcaaatcccaactctgctgctttccacttgtacagattaggcagttgacaatatttcctagcagaactaaatacatccacatctttcagagatgtgaggaattgcactaatgatcacagctggaaaaatgctgttggagttgggcggatcatgaggtcaggagatcaagaccatcctggccaacatggtgaaaccccatctttactaaaaaatacaaaattagccaggcatggtggcgggtgcctgtagtcccagctactcgggaggctgaggcaggagaatcgcttcaggagaacccgggaggtggagtttgcagtgagctgagatcgcgccactgcactccagcctggcgatagagcgagactctgtctaaaaaaaaaaaatgctgtcgttagaaaggccttcaatagatggtgattgttataaacaatgatcactaacagtaaagatactgcttttatgaagctcatgcttaaatgataacttccagcaaaacaactccatttaagctgttttctttgtactacagaattagcacttttcgtccctctaaatagacagacaatatatcatggagaggtgtttccttcccttgaggacgcaatatgctattttatttttcattccattgacatttcttaagaattcccaaagaaggaagtctcagctggcctccttccacatattaagagagaaatgttactccattatgttggacttctgattcctctttctataattttaatagtcactgtgttgagtagtttgcactatttttctcatttaactatcctcagagttccacaaagtaggtgttaaccccattttacaaattggagcccaaattgcccagccagctagcaagtcattaagtgggatttgagctctggcagtctggctgcagagcctgtgtttctcactgtgatgctaggctcgcctgcctgtgtgcctgtcccaccaagctcagggctgcactgcctccacaactgctccttctgctcctgcctatataggctttagtgccatttgtgagaatacacagtaaaggtagtgtcttcgttagctttctgtggctataacaacacagattgggtagtttatcaagacaagaagtttacttagctcacaattctggagacttggaggtctaaaagcatggcactggcatctggtgaggttcatcccaagacagaaggcatcacgtggcaaacatgtgagatagaaatgggactgaccccactttgtcgacaactagcccacaccggtgatcatggcattaactcatttatgaggtctctggtctcatgagttaatcacctcttaaaggccccgttacttaatagcattactaaggcaattcaattttaacatgagttttggagggggacattcaaaccataccaggtggttacccacaacccccattcaaattgatggtaaataatgaatgttaaatttatcttctcttcagtattgattcccatagtccatattctttactggctgttagattttcaccttacatgctccaatgtgcctaacataaaatgatcttagaacctactttgtgaagatgctgcaccatcctgagatggcacaagaggaaccaggccctgagttctgctgctgtgcttcagggggggcctgcattagccatctctggctgttcccactcaagagtgcccccccccccaaaaaatagttcacccagaacccatgctagtcctttcatgcctcagggactcaggatcctgtaacccacttaaacatcacttacctcatctcagggcctaccaagacctatggcctgggcctgccctcctgaggtctgcctggcaccaccagtgggagcacccctagaccccagggatatacagtaactattgggatgatgctataacttgcaggctgtcctgatgatcattaaaacagtgattcagtatgaaagtgctttgcaaatgatgagatgtcacacaaatttagccactgtttggtcattttcactttatctttgaaagctcgtgtttatagctaaacatttggttagaagattaaagtctatgaaaagatttggatccagtaggtcacagcttactagaaacagaacagagacttaaaccatgtgcctctgtcttctggagttggacttttaccatgaggttgcttatctggatgaaatctgagggctttacagtctaactttctgagggagtcattcagggaacgttttagtgtcaagccattaaatcacacctcaaaaggttggaagtggcccacatatgagtccatataggtgggtctggaaaggtggggcgagcaggaatctctttccattatgatgatggggtttctaaagtaattattgctttaaaaaaaatctgcctctgccattttccagtcacactgttcttggagcgagatgcatcatcaatacttttcatactaaacgttctctcctattggatttacctggattctaggggtatttttttcacatttctctggagacaagtagtgctgataaagattttataaggtctctcttgctctcaagctcgttttccttaacttttcttgtcccagttaccagtttatttggtccccagaaaccttctaatcttcatctttaatgataaatttatcttttgtagttctcctgtcaaagcttttgtgtctagtggctcattttgcttaattgctggagttttctctggccttttgttatttggtcctgcgtattttcaaagattctgtagaattttcagactgttactctgatgtttacttggtagattgattgctaagttgcattgtcttcagaggaggtttttgaggttgtgtctattataatgtctgcttctacccggagtccattgcacttggagtgcttcttgaagcccctgagcttatgctgtgataaaagcgtgaatgttttactgtgtcaaagcactgtggctcataaggcttcataagctctggcttttatatcagagcatctcatatggttgtgcagattgcatcctggtcaagcatgccaggatgaggggccaagggtgtactgaatgccagcctgtgcttcatttgccaagccttgcatctgatgtaggactgtatcctcacaggggacaccttttcctaatacacacaaaggtatcatgtgggctagcagctgttctgctataacttagctaggtgtctttacaggagaaggtagtggaagaggtggtggtatttctcctcgggaactgagattagcttactcgacgggaatcttgaagtgtcccaagatgaagccattggtgccccactcccccaacagttgtttaaaagttattaaagaaccaattgacatttgctagcattttaaatgctcaggatgacttatgaggctatgtcagttattctttactcagtaggggacttggagctacaggtctgatttcagcctctgtgcagcccccgggccacccttcctgctgaatctaagccccactctctctagaggattatcttggggtttattttggctcctggctttgaatctgaattgctgcccctcaagttatattcaaacaactctattaagataacgttgtctccaggggctccaaccagccagtttcattttccaactagtttggttggtcagtgcccataacaggtccacttgaaattagagctgcgtttttttttttcttttctttttttctttttattattttactttaagttccagaatacacatgcaggacatgcaggtttgctacataggtatatgtgtgccattatgatttgctgcacctatcaacccatcacctaggttttaagccccacatgcattagctaattgtcctgattagagctgcattttctagaagtcaacaacatagtgtcttgaaagccttctttgtcatattgcagttgtgtctgagacctttatgtaccttagtttttttgggttttccttccccatgtgaaccacagttaccctttctctgactagtatgctgaagttatagtacatttctatttagcaggtgtttcctgtggttgccttttgttctaaatctatgattgaaccttatctatattgaaccaagtctaatatctatttgcctggacacctgtactaacataatatgattctttttgtatccacccttatattaatctggtaggatttccataacaaaatactgcaggctgggtggcataaacaacagaaatatatttcttacagttctggaagctggaaatctccaatcaaggtgttcgcatgtttgctttctcctgaggcctctctccttggcttgcagacaacttccttctctatgtgtcctcacatggacatggacttttctctgtgcatatattcctactgtctcttcctcttatttatttttttgagatagggtctcgctctgttgcccaggctggagtccaatggcatgatctcagctcactgcaacctctgcctcccaggttcaagcaattctcctgtctcagcctcccaagtagctggggttacaggcacctgtcaccacacctggctaatttttgtatttttagtagagacaggatctccaactcctgacctcaagtgatccacctgccttagcttcccagaatgctgggattacaggcatgagccattgcacccggcctctcttcctcttcttatggggacactggtccattggattagggccccatgcttatgacctcacttactcttaattacttctttaaagtccctatctccgaaggatatgaacagacacttctcaaaagaagacatttatgcagccaaaagacacatgaaaaaatgctcatcatcactggccatcagagaaatgcaaattgaaaccacaatgagataccatctcacaccagttagaatggcaatcattaaaaagtcaggaaacaacaggtgctggagaggatgtggagaaataggaatacttttacactgttggtgggactgtaaactagttcaaccattgtggaagtcagtgtggcgattcctcagggatctagaactagaaacaccatttgacccagccatcccattactgggtatatacccaaaggattataaaacatgcttctataaagacacgtgcacatgtatgtttattgaggcactattcacaatagcaaagacttggacccaagtcaaatgtccaacaatgatagactggattaagaaactgtggcacatatacaccatggaatactatgcagccataaaaatgatgagttcatgtcctttgtagggacatggatgaagctggaaaccatcatcctcagcaaactatcacaaggacaaaataccaaacaccgcatgttctcgctcataggtgggaattgaacaatgagaacacatggacacaggaaggggaacatcacacaccggggcctgttgtggggtggggggagcggggagggatagcattaggagatatacctaatgttaaatgatgagttaatgggtgcagcacaccaacatggcacatgtatacatatgtaacaaacctgcacattgtgcacatgtaccctaaaacttaaagtataataaagaataaaaataaaataaaataaagtccccatctccaacatagtcatactgggaattaatgctgcaacatatgaattttggggggcataattcagttcataacaattttcacttgccagactttcttatttaagcatatccagtagatattagaacaaaaacaacgtttaatttataccttttctgtccatttgggctcatggagctatgttaaagacttcatttccatcctcagaaaaacattccatttagcaataattatactttggatcttgccccttagacagcttcctaattgttatttccaaaaatctaagcctcatttttggaaactgctcccctatgttaagtatagtgaaacgcttccagacaatctcattttgttaaaattaaattggtgttttctggaccatgtttgtcccataagcagcattctcaaagggctcggcaggctggggcccccagcctgtgcttgtagacatcatgttgatttttaatcaaaagccttattttggcagcttccgtttttttgattgtttgaaaaatacttcctgatggcttggagtttagattctcagttgttggatcctgaagaggagtttgaagccttagtttttcaggaaaaagcacctgacctgtgtatcttaagctgctaaatatttaggaagcatcagggcttatttccacttctaccacacaatattgaagcaattcaacaattgaatttttttttccccgctagaaaagagggtttttcaggccactttgaaattcaggtggttgatttaaaaatgcaaattctttgggaattaatcatgaaatgtttcaggatttttataaggaagctcatccgctcagtgaaataagggatgctttcttggtcatgaattttctttttgtactattttgttagttacttggtgggctagacagtatttttgggtgccactggcaagtctaaaacacaggaagggagaaagaaaacagctgacacttacaaagtctgacccgttctgtgctggaaacatttggtaaatggttaaatttactgcatatgcttgaaacgaatagctgaattaataaatgaatgactttattaattcaagctgttctatttttcaaataatccgaattagggatagtggcagagaccatgtatgctatgtgatcattttcctcctgggcacataatgggaactgtgcaactcactctcaagtgttgttgggtagggccatggggttggattctggccaatgggatctgttaggaatgacatgtggtacttcaaaacctaaaaatcctcctgcatgatcctctgcattttctgacttcctttatctactgactggagggtgctaggagatggtggaggcataagacagaagtatgctgtgtcctcgaaacacaacatggagcagagcccctatcaatgcacatgaagccacaatgtgattgagcaagaaataaacctttattgttttaagtcaaggaaatttgattgtgggttgtttgttacagtagcttgtgttaatttttaaaagtttcatgatggtgtagtttcttagtatcattatgctgaaaaatatttgacctgaaagcaacaaatactgcaatcaaagtacctatgccagtttctgttctattaaaaacaaattcccttgctctatttattccaactaaaatcacagagatgtgctaatttacaggccagcagagtgcttgtcacatgcacattaaaatggtgaacatgcaatcttttagggaggtgaatagtggcaggtgtctattcttcctctaaatcctgcccaggagactgccttgcctgggcataacccagcagatgaagtcatctacctctcctggccaccatcatctgattaagggaattcagactacatgctttagatggtgaacatctcacaaaagggatatgttatcagagataaagtgtatgaattccacgtatgaccactgcatcatttgtgaatgcttaccgtatatgactgtatgaatgggccacctgcatctcagaatgtttttggaaaaagggattaaatataattgaaagaaacccaagaaagagcaaaaagcaaaggctataaggaatgagtctataaggttttattttttttcttcccctttgagaggtagtcaattcataacctagattcctccctagccgcacagcccaatatggcagccactactcatatgtgactatttaaatttaagtttaagttaaaattaaataaaaaatttattttctcagtcacactagccacatttcaagaatacaacagccacatgagttagtggttgccatactggacagcacagatgtagaacatttctgaaagctctctcagtgctgacctagagctagctttggtattttcatcttttcatgatgcaatacaattgccaaatttcttacttctcatatactcaaagcaacctcttgaaaaaaaattttttttttgagatggagtctcacctcttgaaatgtttttaagattgttacagtataaattctggaaaaggttctagaacaaattacaaaagattgatttctgagtacacattaagggaagctgtgataattagaagccaccaagcattcactaaaattaagttactacacatttacttcagtgactggaataaaaatctaagcttcaatgaaagaaaggaattatttgtttttattgccaaatatttgcagttcttgcacacagtaggtactcaacaaataacttttgaatgactattagagaaataaaattgatatagtcagtttcagttttcatcaagttaaattagaaaagtccttatgctgtcattgaagaaatggttactgggtcgtagggcagttgggtgagttgccaatgagttaaccagtcatgagaagtagctgacgaagagagcatgagacttgaaattagatagggacctaccttcaattcttggctttcacttaacctgtgtaatcccaggcagccatttcacttttctgaatcactgtttcttcatcctcaaattgggcataatagggtgctcatatcaaatatggtgatattaaaagctagcatgaacatagcctggaaggtttctagtagaatgttgtggagtggttcttcacatttagctagccagtgcttctgtctctgacttcagtaaggatatactgattaaatttgtggatgacccaagatggagtaagaatcagaattcagagggaccttagtagacaaaaagataagctgaatacaatccttaaaagtttcatatgggtaaataataattaagaaaactgcaacagtaattgacagaggacatgtagtttaacctcattgtgcaacagacttgtggattaaaaaataatgtcattcactgtgtgatgtggctgccagaatttagattttagcaataggaataaggtatgcagagtagcacatcagaacgcctaggaagttaaaaatgccaatggctgggttattgccagagattaattaattgatgtgggatgcagctttggcattgggatatttcatgcccctcccctgccccgggtgatcctaatttgagaaccactggtttaggctgagggaggtcttgacgatttctgttcgctccacttttacgtagtctattaagttacttgcatggaaaaatgcatgctgcatgtagttccgaatgccccacccaaatcttggagcgtatcaggaagagtgtggggacagtgagtggatggcaattataagagacatgttgaagaaaacaaaaagtttgtcctgaagaagagtaggaagaggtaaccgccttgaacattgcctgcttggtctattttaggaagctgggttcagttcttctctctggtattccagaggatagaaagcagtccactgggtggcagcttcaggagatggatgtagggaagcatttgcttactacagtgctttctagagatggtgggcttgccaggcgctggagatttacaaagacctcacagattttgttgagaatttaaagggacttaaatgtttattggcagattcaacttccagaaggtttcttttcatccctctcctcatctcttactcttttgctttcatccactgccttggccacactggtctcatagatgttatttaagccccgccatgcaccatctcagggtctttgcacttgctgttcttcttggttgaaatacttcacctccagatatctggacaatttcctctcatgtttttgctcagattacaacctttccctggactccttgtccttctttctttttagtgtttctctatccccatctctcttacacacacacgcacagacacagactcacacacacaaatacgcatatatgtgtatgttttcctctaacaaaatataagccccacaagggccaggacttttgtcggatgtgtttgccaatgtatccccagggcaagtatagtgccaggctttcagaaatgctcaagcaataatttgttgttgaatagatctctgggatcttctggttccttggaatttcaccagtggtagcttgaatttcctattcaggcctggacaaacatcctgtaaagaatgccacctaatttgtatctttgaaggatgaatccaataatatgtgggtacagtgaccactttcaagcttttcttctttcttcttttctccccctgcatcaaacaggaacagcatcttctaaaaacaaaactttattcattggtcagcagtttcatgcaaccattgagtgaaatccaatgtggaaaggaaatccaaaactttactgcagtgtaatttgtttcttctgtgttgctttgtgtacagtaaaggtcaataatgcacaggaaagctaggtttaatttctttgatgtgtaaaaattagtgctttgtcatcagttacagtggcaggaggacaaatcactggcacataaagttgttcctgctacataaattacaaatcttgttcggaaaaaaaatactcacatcatcccttgttattttaaaaatgccaacactgataaacagtcagccttggacatgtattaaaatcttcaaattgtactaaaataaatttagccttttaagataacacctcattttaatttcatacatgattaaatccatcaattcaaaggtcttttaagatgtaagttttgaaatcataatagtaccctctaactccctgcgaaaaacttaaacctctttctacttcattaataatgttcttgacagacaaaatttttaaagaaaatcctcagctttgttttgtgtttttgtgtgtttttcttgagaagaggaaattaaattatgatcataaatccctttcatttttagaactagatttttcttttaatcataatccagaggaagtggaaaaagctttgtgaatcaagttttgtatttctaacatgatgacatagtctaaattattgtccaatattcagcaaaatctttatttctatatgtggcagaactgaatattttagtctcagcataaatagtgcctcctcttccctatccaggttgatgactgcttccttgtgactttgcaaacacaacttcttcttattattattatttcaataggatttgggagaaccagtggtgtttggttacatgaatatcttctttagtagtgatttctgagattttagtgcacccatcacccaagcagtgaacactgtacccaatgtgtagtcttttatccctcatccccatcccaccctttctcctgagtccccaaagtccattgtatcattcttacgcctttgcgtcctcatagcttagctcccacgtatgagagagaacatacgatgtttggttttccattcctgaattacttcacttagaatagtagtctccagttctatcctggttgctgtgaatgccattatgttattcctttttatggctgagtagtattctatggtatatatataccacattttctttatcagcttgttggcggatggacatttgggttggttttatattttggcaattgcaaattacgctgctataaacatgcgtgtgcaattttttttttgtataataacttcttttcctctaggtagatacccaggagtggaattgctggatcaaatgatagttctacttttagttctttaaggaatctccacactgttttccatagttgttgtactagtttacattcccaccaagagtgtaaaagtgttcccttttcaccacatccatgccaatatttattattttttgatttttttgattatggccattctgcaaacccaactttgaatagactatcaaaggttggggctggatatggatctgattactcaccctggccccggaggccaccttcaggcagagcagtcctgcagcctttccagaggaggcagcctcctgcccatgtcaaagaccttggaggctagagtatttgcccttctgctctaatcaagatctccttggaaagaaagctcaatcagcaaatctttattgagtaccttccatcagatagattctccagccccaagctggtatggtgaggataactatatctactgtaaaatacctgacctaaagaaacaatgcaacatgtgcatatacaattttaaaagaaaagctgttcaccattttctaaaggaaaaattatatctataatgtatgtattcacatgtttatttttatatatcaacatttatctgctttttctttccatgcctcccctctttccgtcctttcttttcctcctggatacatccattcctgcagcttaattcttattagctaagggttatattgcagatgtatgaattaagagcaaaggctttagaatctggcagatctatgtttgaatcccagctctgccacttcacaaaaagattgttctatttgttattgttactggcacttttattgccatcatttgtagtatagacaataattacttgtgctatttatgtttattagttatttaccatatcaggcactaagggatttgcatgtattttgaatttaatccttgtaacaattatatagtgtaggtagtattatccccattttatggctaaggaaactgccttgagattttaagtaatatgttgcccaaggtcacataataagtatgtaaaggaactgaaactagctttgtgttttgaacctacggagattctctttatcctctgtaaaatggagatactgattcctgccatggtagctagttgggatgattcaatgatatgggatatttcgcatttgcagtttggttccctgcatataacatatgctcacacaggatatggctgttcctgctctgcttctgctacctccttcaaggttgaataatctttctttcttctctcttagctatttcccagcccctcacttaagtttataactatattcttttcatcaacctagaaaaccaaatgaagcctgaagtattgagaactcaggaaatgtttttgaggtcccatgtgattcagtggcaaaggcagagcaggtgcagatgcaaacctctgggctcttagatgtgaaccctctgcctggtgttttatcctagcttgtctctgcagcaaagcaggtgctggagtctgagggggtccttgaggccagcttcccctgggcacagaaatgtgctctccctagaaccatcacatggcgattttcctggcgatcaggggccctaaatggtgaaagggttttggccatacatcactaaaagtgtgttagtaagaggcatgaggccccttgggactggatgtggtggatgtgtcatatcacatatgaagtggcatgatttgatagtgtgccattttctgtctgtaactaaatcaaattctgtggttgaaaaggactcatacataatcttggtgtcctttaacgcagtcatagttcttgtgttaaataagttaggattggagagttgcatttctagacccgaggggagcggttctggatcttgctctggtttcctgagttgctgcagcacccaaccctgagcaattcctgtgactcgtggtggttgttatagagagggtacacagtggtgaatgagaaggaggcttattattgttatctgtaggcaccacttttgcttgaaaatgtgtaatggcaaactcaaaagtagaaatacttattccctattaattgtcttttttgtcataactttttaaaattttttgggttctttgattcaaatttcacaagatctcacctaatatgctggtaaatttcaccagaagtatgaagacagaataaactttcttgaatttttttccctgcaatgtaacagtctgcttctagatgacttcttgaagaattatctacctaatttgtattttttaggagacatcagagacagaaaaaaattcacattaaggaagatatgtgtattatataagtaaatcctctttgcttacagttcttttttaaaacaagcattttatacaaagtaaaataactttagcagtttggttcatttttaaaatatttcatgcctgcatgcatgattaattgagacaatcattccatttaactaatatttgagggcatactatatgccaggaaatggggctactcaggccttcacagatcttgtaatctatcaaccaatacaaacaaataatcaggccattataatttagaggacagtgttttgagggcacatggcaggatgatctaatgctgacttggtggaggacgcaatgacttcctcctgaatgaagtagggtttaagccaggtcctgaaggagagtgagtgttaacctggtggagctgttggggcaggctaggggctttggactagggaatagctcatgtaaatgcctggagtgggcagccagccatggtgttattgtgttcttcttcttctcagagatatttacatgggcaagaacttcagattatacttgattgtgacatttgcactttcaaaaaacattgcaaaactgcctggtgaaaaccatcccagtcttgacaggtgcatagtctgatatttccaaaggtaacagttgtcacataggtggtcctgccctgttgagacacaagcccgttaagcagtttattttcaccccatggccagattggctttggagcaatcaatgcagcctggtgcagcctggagaagagatcctactggataaggtgggaagcctttgtaaatcaaaggttctaagactgctcctactgggaagatagaagtgatgggtggaatggatggataagtataaagaaattctttggttctagaaccctcaatgtaaaaaacattagaggcacacaggtcataatcatgtcgcataatttgattaatttcctaagaaaccttaatactacaaagtcatattgcatcataaacttacgttttatggagcaaagagccctgggcttgggaagggtccacagggtctgggttctagttccaaccacatgccctggggtcaattatttaataacctataatgaagctgtcgtattctatcaccacgacatggatctggttgtgccaaggtagacatttgagattacataccgtaaaataccgtggaaaataactgtggctctcaccagctctagcctctttctgggcttcatagctccccttccccagtgctccctgagaatgtatcattcagaccatcttctgtccttcattcatagtcatagtcccatgcctcagtgattcaacaatcaggctctcttaccctatttttgcttacccttcttttttctttcatttcagatgttcagtaactgaaaacaaaaaaggtttaagtatgataatgaatttttttccacactcaagaatataaacattgaaaagattggcctctttatgctccctacaatgagtgacaggttctgacttaattcaacttaactgtagagattattggcataagagttattaatataaaagtcatgactcaaaaaatatctccactattaaatatcccctgcaaaactttattatccaggtcttggcgtgagctttgattgtgttgaaagaatgaacttgtgtttttggccctgtaatgtgaatgatggacaggagagtgatttttctgttactgggtggtcatcctcttgaacaagaggattctgaaagtttctttttatatatttgtgtatgtattatttttccttttccatttttgattgtagtgaaagttctatctctaagcattaaaaattaaacatttaaaatgtgcttttgcaatggggaaaggactccctatttaataaatagtgctgggataactggctagccataagcagaatagtgaagctggaccccttccttagaaaaatcaactcaagatggattaaagacttatatgcaaaacctaaaactgtaaaagccttggaagataacctaggaaataccattctggacataggacctggcaaagatttcatgatgaagatgccaaaaacaattgcaataaaaacaaaaattgacaaatgggacctaattaaactgaagagcttctgcacagcaaaagaaactatcaacagagtaaagagacaatctacagaatgggagataatatttacaaaccaggcatctgacaaagatctaatattcagtatgtataaggaattttaaaaatttacaagcaatgcttaatgacgagttaatgggtacagcacaccagcatggcacatgtatacatatgtaactaacctgcacattgtgcacatgtaccctaaaacttaaagtataataataaaaaaacaaaaacaaacaaacaaaaaaataatttacaagcaaaaagcaaacagcccctctagaaagtgagcaaaggacatgaacagacagttttcaaaggaagacatgcaaacagctgacaagggatatgaaaaaatgctcaatatcattaatcattagagaatgccaatcaaaaccacaatgagataccatcttgtaccagtcacaatggctattactaaaaagccaaaaaactcagatgctggcaaggttgtggagaaaagggaacacttatacattgtttgtgggagggtaaattagttcagccattgtggaaagcagtggtgattcctcaaagaacttaaaacagaattaccatttgccctaggaatcccattgtatacccaaagaaatataaatcattctaccataaagacacatccatgcatatgtttactgtatcactattcaaaataacaaagacatgggatccacctaaatgcccattgatggtagggtggataaagaaatgtggtacatatacaccatggaatactatgcagccataaaaaagaacaagatcatgtcctttgcagcaacatggatggatctgtaagccattatcctaagaaagcgaactaatgaagaaacaaaaacccgaatactgtatgttctctcttataagtgggagctaaacagtgagaacacataaacgcgaacacaaagagaagaacaacagatactggggcttatttcagagtggaaggtgggaggagagagaggatcgaaaaactacctatcaggtgccattactgtgcttattacctggatgatgaaataatctgtacaccaaaaccctgtgacacacagtttacctatataccaaacctgcacatgtacccctgaacttaaaataaaagttaaaagaaaaaataaaatgtgcttttagaagtatccagaccaggccagagcttgtataaatccatattactatcttgcagttggtcaaagtagttaagaacctgtgtaatagtgttttctgggatgttgcaacaactttctatctttattgcaagggctttctgtcttcctattatactaattaattctttcagtctttcctgattattgatgccatgatgattttttttttaagaatttgatcctgcaaacttttatgcctaaaatctctctagctttactattgcctccagcaggaatttttcacctaagttcatcaattgcagtcaggaaactggtaaactctgagtctttctgcaaacttctgtgtgtagaggatccagagtttgagtcagaccctgaaagctatccttgatcagatttagaatatcctaactctttagtaagaaataaacccgtctagctttacatgcagccaccagccgtgacgtgagactcaccccacactgacctattattcaacatttcctgatgcttccatacttctctgcctttgaacctgatgatcattctacttataatgtcctttcctcatccttagctttgcctgttgaaaccttcaagattttactccagagccaccttgtctggagagattttatttactttgtgaggaacaaaatgctgctcttttatcttttctcctcctttataacactcatcacctctccccactaagtttgtggacaaggaatgtattctgtttatctatgcattcccagcccagaggaaggtactggcccagagtaaatgctcattaaatattgtgaataaatgggcaaaaggatagaagacacattctttacttagatggagttgagataaacttagagagttagtgctagaatcaacattgccttcttgcaggcaaatgatttacataatctggacatcaagttgcctgtcccctggatgaggtatctcagtctcctatgttaaataatagtaaattgattctttcttcaacacagagtataacaaatacctctaagtattctaagttttatgaaacaaaagatttctggtgctggagattgattttggtagttataagcttctcaggatatctccaaagagacaaggggcctaggtggatagaaatatttcccttaaatcagcctgataaaaagttctccatggtaaggtagcctttgtcttgtattaaaacgcagttttctcaccaagtgactttggcaggttggtgaatcctttaagaaaaagagatctggtctggagttgtggtcccccggagatttagttgctattgtgatcatctgatgacagcagaaaacccagggggatcagcatggtttatttcagactgcagggatgtcagcctgttattataggagtgggagctacctaggcagatggatgcttcctgatttgtggattgggaacacgaattgagcagcagccaatgcagtgacacttgtaatactcttctgaagccctccttttttttttctgtccactgagaaacagtacccacctgctaatctacaaggcaaagccatccttatttcaaagtgtatttgatgcaacaaaattctttatgctgaaaggctttaaaaggcctctaaatttctagaaatgagatttaatctgatatttgaatcttatgccttatatccaaagaacagtctctccctagtccccatttctatatatagatgcagaaatttcataattggaaacctgtgactttagcttatggcttggtcccttgtgaagaatgtattgtgctttttaagtgatgtgtgtatttgtctgaattagtctatcagaagtttctttttgagaatagccattaatgaagatgagaaacagagctgtgagggacatgaggaggaaaacaaacccattaaagagaggaaagaactccctgccccaaccccaccaacccaatagcatttaaggccaccaaagggaacgttttctgtgttactgtttattcaggagctggcttctaacctgccatatgcttcactctatttagagagcctaggtaatgttctctcattttgtaaggagataatattacttaacctaagagcttgtgcaaaactgggggaaatagttggctaataagttacatgcatccatgagttgcacaatagagatgaaatgatgacaaattgggatgagaggcaatgagtgttgtatgggaactacaggatttaagatttgaaaagaggcattttaagagcccatttttttgctttttctactcagcttaggaccccaattattacttactagcctcatttcactggacttcacccattcacacacctgtcacccaaaatactaccaaatattttctttaatgttatttttgcatttaatcctcatgaaggttaataaagtcttctctctctatgtggtatgaaagcataactgatgactttattggtgcagatatattatggctgcttttgacgtttatgttttccgtccagatagatgaatgattccagtgaaagtaaatcaattgcacccagactgtgggtataaaacaccacgctcagggttttccttcttgtctggcagatagtagagggtgtgaaatattgaaatttgacttaatgctgtatgtttcttctgaaaaagagaatttcctttgactatctcctaaggtacatctgtgattgatatttgccctgtcatttagtgccaatccagggaggggatgccccttttgtggggcctgtttgctctccaagggagccttcatggcttccttcggtctagttggagtaacctgttttttcttctagaggattgaattcaattaacagggattacaaattcagttattaggaatttatcagtgatggcaaatggaattttactggtgtattagtccattcttgcattgctatcaagaaatgcctgagagtgggaaatttataaagaaaagaggtttaattggctcactattctgcaggccgtacgggaagcagagtggcttgtggttctgaggaggcctcaggaaacttcaaatcatgttggaaggcaaagggggaacaggcatcttacatcgcaggagcaggaggaagagagagagttgggggtggggtgccacacctttaaacaaccagatctcacgagagaactcactcactatcacaagaacagaaccaaggggatggtactaaactattcagggaggatccatcccgcctacacacacccatttccaatcacctcctcacctccaacattggggattacaattcgacatgagatttaggtggggacactgattgaaactttatcaactggattcccaacaactggaaacatgagagagtaatttcagtttctaggatgggtttaactggctttcatgataaaaagagaaatatttcttgatccacaagaataaaggtttttgttgttgttgctgctgttttttccaaaagtgatttgagttcctagtgtaaatcaaaaccagacgcaactgtaattgccaattgatggtacaaatggacaggtaaatccaagaagtgtatttcaatttttaaaaagttctgtaccctggaattcccttcttcagcttgccttccacctctgcattcaggagtgctatggccctgatcaatcaaaatgaacactggctgtaaacaaccagcatggtggtggtgctatgcctgaatgtcagccttttctggtcctttgagcaagaattaattgcattctcattaggggtcctgggaacttcagggtcaatctttcttgtggaattgagcacattgttttaaagctatttgtttatttgtccagttcaatttccttctagacagtgaagcacttgagggcagggactgtatttatctacctttgtatctttatcaccaacttggtgcctagcacagagacagttctcagtaaatctttgcaaaataaattaaaattgtagaggatatttagaatttttattctaagataaatgcaaatgtgttattgtgtcaagcactcatctgtatttaaatcccaattactggaatgtattttaacaatagtttagtctgtaccctaacattgactgtgcgaatttctgacttatagtttaaaagtctctagggaagaaaatttcaaaacttcctcgttgctctttttagaagttcaattacagtaataatcagcacctactaactcactgggatatttctagtattatttgctctcatgtgaccatatagcatgtatctcaagtgctgcacaagatttgcagctgtgactgtatggaaagcttgggaaatattgtgctgagctccttttgtaagggatgtggtttctagattctgtgttcagggaaaaaaaagtctaaaacctgcaagtactcatttgtggaacatttaatttcattactttgttagcaaagcgtgtatctggaggtaaacaccaatcagctacagttggcttcaggcccaagagaattgaggttaggagtcaagacagaaagatggctattgcaggaaaatacgtctgctctagactaggataaattttcctattgaaatatgaaatagaccattacacagaagtttgcctaccactaaaagtgttctagaacattatagttcaagggtgccaaattttaagcaaagtcctgtggtttcagtgatgctattttcaaatcatgattcctgtaagaacaatctctgccactaaagtgtagctttctctcacacacttattcatatattctggctgtcctctgtcttccactaatctgagaagtttatggcacaaatctgattcttttccttaaatacttgcattaggttaattcttaggtggcccagtaaccttgcgaagaaagatcagtttggggcaaaccatgtgaagccccctttcaaattcatttctgccctactttctgtctgctttaatccaccacatttccttgtctattttgtactctaggtcaaaccacagcagcacattttaaaacctggtaggaagcgggtctcagagctctagaggaactattatgccagtcttacaaattattttttaattatcggtttctcagacaactcacttggtttactttcaggaaaaatgttatcgctgtaaatgagttgtactttcttctgtcagaaaacataaagtgtgtaaccccttttattttagctgagtgtgaatttttagattcaaattgtttgccatgtatttcttagtttgtaaatttgaaatgaagcaacataaacaacggtttctgcccggagaaggtcatgccagtcaggaccctgcgcattgatggtcatcttcaggtgattaacgttgatagatatctgagcagagaatagtgcaggatggagaaggagccacccacagacagggtttagcacattcagagtagactcaccaggctaatgctcatgggcccgctctggtttcatttagggctgagagactgattatatgaatggacaatggccagaccctatatgaaaacagaaccctgacccacaacctgcagcaacccgcccaggaaactgactccttattctcaataaagaacccagaaagctagcctgccatgagttagacttgtaacaagtcagattgcaatctccagtaaccatctaggaagctaaacaataacttcaacaattgacctcaagtggccaggacttgatcaataactggcagcttccctaattttgtgtccccatttttaacttaggatgaacgagagacagccaaataacacacccctaacaaatcagacaggatgccccacttcctgttagaccacctacagcttccctgcacccataacctttaattagggcacatctgaaaccttcctttttttcaggataaagctttcccacttctcttcctgcctttgtgtctccgccaaaatgcaagtgacagtgtggctgactccctgcctctagcaagctcagaataaatagcctttgcttgttctcatttggttggtctttgtttatttccagagggcctagttgggcaagaaatgatattgtccaggagcacgttttaatttcatggtctctgtaggtaggtgattccatgtagctgttgttccttcaggtacattagcatttcctagctttggggtgggggctgtggctgacctgtgagagatgcagccttgctcccacttgctgttccacgtgtggaaagggcagagcagtaaagcacattgctaaatgtcaacgcatgcattaggtattaccatctcacggtgaaccccattcacatggcgcccagtagggaggagcagaggggcctctttgcaacagagatcaatggccaacagcttttctttttttaaaatgtaaaactataaaggaaaaccttttcaaacattatcctcaaaagatttggaaataggagatctgagattagtgggtcactgaagggctagcacttgcttatagatgacttagcttagaaactccaacttcctcatacttttgtttctgctgataatagaatgcagtacaacaggagtgaaaaacaaagccaaattatttctttatctttttctaatgaaaattcaatgacatttcagcagtgacttcttcccaaaccttaaggagtacatataagcgttaagatgagaagttgaccaattgcctaagaacagtttgaagcatatcacaccttattttgttattatatttggtttctactacgtagagttcattatctgtgttctctctgttattactatatttgagaattgtaattatggagctttaataggatgaaagaaaagaaggatgcaaaaatacttaaatactgttcatgatgaaagatctacattattttcaaattatcttttattttattagctgagtttttagggtcctatggcaatatactagagtccaagtattttttcaaagtaatttaattttatgttgttatgattaggtaagtctactgaattgaatcaatttataggaaaagtatgagattagtattattaaatttcatactgtagtctggtttgctttaatatacctatatatgtatgtgtgtgtttatttaagactttagttgtgaaatatagactcctgttagtaactgatgccttttccttttctctttgattagaagaaatacattagaaaggtatcagaatcaactcatttgccagttggcaaacattcctggaattttaagaattgtaacaacaataaaacaataactgtttattaagtgcttactatgtgcactgtccttagtgctttacttctgttattttaagtgttagattatttatagagatcacagtaataatcctttcattgtttatgcacgcacatttgcaatgtaaatttgctgtctgccccacctccttctgtgagggaagtctattttccccttctctgaatctggtctggccctttgactttctatggtgaataaactgtggtgaaggtgatattttgcaagacaaggccttgggagacactgctgctttctctctcagcttcttggaacccagagctgggatgaatgaccatggagggaagaggctcagccacagaactagcacaaccccttgatatgcaagcgaggccatcttgaacaagccaggtccagctgagctaacagatggctacaggcaagacccaaaccaaatggtaccccacagaattataaaccaagcaaatgtttgttttttaaaatttttttttattattttatcgttaattgtagtaaaatacacagaacataaaatttaccatgttaactatttttaagcgtacaattcagcagtattaagtatattcacattgttgtacgattaatctccaaaacgttttcatcttgtagaactgaaactctatacccagtaaacaacaacttctgtttctccctcctgccattccctcacaattaccattttactttctgtttctgtgagcttgactattctagatacctcctcatacaagtgaaatcatgctatatctttatgtgactggcttatttcattaaggataatgtccctcaagttttatccatgttgtagcatatatcagaatatccacctttgtgaggctgaataatatccactataggtatatgtcacttttttttcatccattcatctgtcagtggacacttgtgttgcctttatccaaatggctgttgtaaataatgctgctaaaaacatgggtgtgcagatatctctttgagaccctgctttagattcttgtggatattcccagaagtggaattgccagattatatggtaattctattttttaactttttgaagtgttgttgttttaagccattcataactgaggtgatttgttctgtgtgatagctgaaacacctaactgaattttgacaacaaggcttcgaggtagtttctaccattctcatttttcaagggagaaacttcacttacccaaggtcgtatggtttggacaaacagaaccaggctttgataccatgaagtctggtaccagaacctcactctgcggcacactgtaccactttacagaaagcatgttcagaattgttttacctatagtggttgacgctggacagaaagaaacatcagtaaccaacaatattgaaaagatccctatctatgactgatgtagttcaaggaagtatacttttccagagtttgtagtatttatccattgtatggtggcctctgagcttatttctgtgttgtcagctaggcttaccctggtggtgttggagggaatagtactggatgatctacagggaggtccactcaccccactccagggctgctgggtccagatgggcaaattgggttcgaacaaagggccttgccagagtgggctggaatccagagcccatctggattccactcaggtgggaccaagcctgtgctctggccatctgggagtaaggggtcctttttctaatggatcctccccggaaaggctcctttgtgcaattcatctgaccggagaaggtcctctccttaagtccttcctcttccctcagatagcggggctgttgttgaactgtatcacagctccctgtcctccccatcaccaagtccctgccccttagtgctggatgactgttgtttctcctccatcagggtaacctgtgttgttgaagaagccaccagaaaaaactgtggttgagcaataatgaactcttgacttgagcgttaaagcggggccccagtggtttgcaggagccggtcaagtagagatagaccgagatggagatgagccactgtcagctgagtgtgtaatccaggaggctgtctttacacagtcctgggctttgaagttggagcaactcctggctttaccacctaggaaccatgtgactttggacactgtacttaacctcatcaagtctctgagacacaggtacatgagaaatgcctgccttacaggactgctataggctcaaaaaacaaagtctctaaagggactggaagagaatctattaaatagtcaatgttcgatacatgttcattgttaccacacccattcttcctcattacttccttcacctcctcccaaattcttctacagtaataataatattactattacaactattatcattaaaaccagaggccagtttagttagatttggtggtatctgatatgattcacattaagagagttataatgaagacctgcttgtgattgcaaaggttcacttgcaaagggataggatgaatgggatgtggattagcagcagcattataaaaaactttacaagtttcagttgagaataatctaacatgcttcgacctaaagaagcatacaagtaagcccaaaaacaaggagtagggaagggcatccaccaaccacaaggccaagggaaggcctaggtatctctacaggacagtgaagaattgtgacctatagtttaatccaccacaaagggcatgcactggtatggttggacagtttttaaagcatttatccatcctaaatgggcagtcccaatgcttgattagtagtgccagtgtaatgcctattgttaagtattttgagtagcatcctcattgctaagaacttcatctacagtatatcatttactctttttctttctgcattagtctttatattagatacttatctatgtatttatgtttatttaaataaacttaggggtacaagtgcaattttgttacatggatatattacagtagtggtgaagtctgggaggaaataccatttacttttaacaacaaccatatactttttgtatatataaagcacagatacatgtgcagtatacaaacagatacacagtatatctgtgatattaaaattttatgtgggggagcaattagaaaaaatgtctaaaaagtgtccttagagggacgataatgaaaacatttaagaattactggcaattgatatttttattaaataaatgtgaaaatataggttgagaggttaaataattagtccaagaacataaaattattaggtgtgagagctctgacttatacccaggtttgtgcgataatgaagtgtgtgcttttatccaccttaccaccttgcttccttgcccttcattcagctctctgaacctctgcttccctccatgtgctttactgcttcccatcctcccagatttctctgtaccctcccccggtagtggcctagattctcctaaactgctctgtcccccttctaggatctgagatcccacctctttggtttcattgttagtgaaggaatgcttcaagggaaatttctgctcttgggttggaggaatgagtgtttgcattttaatgcccattcagagacatttctcaaaggactgagtcttttccagtgggacttcaggatctctcacatgccagtgggaagcaatttggaactgtgtgctttgcaaacccgtgcaaatcatagcaggaaggccgatgcctatctctagctaaagccttatgtgctatatatcttcatgtgaatgtctggacaagaatcccctgctcttatgccataacctgggctctacacctgaatttctccatgtagcaattccaagaaaattcaatcttcaaaacacattttttagtaaatagaggcagccatgagaaacattttgttgttgctctgaaaagttgttgttttataaaatggaatagtcaatctcagctttctaaacagagtttctaggatcaatttatcaggaatgagtggattcctttctcttcctcccaaagggtctatggaagatgaagaatacaagcaataatagcaaatcaatcaaatttacattgcaaagagtccttcacaaaagtacctgagagggctctacctagataatcagatgctaacattacctttttcccaaatatagtccacctctgcaaagaaccaaggagtgtgggcttcagcttctctacagagtcgctggtggttaaactcaaagtagcagggcctcacatttgggcactgctgtgtaggaggtgccaagagtcagtcactcagctgatggcctctggtttccaaaggaaaaacaaaaactgttcagagctattgttcaaaaaggaaaaaaggattactccccaaattttagcacccaaaagcatacatgtgagtgtcaagtgctaacatttgcccaagtcaggtctggtggctcatgcctgtaatcccagcactttgggaggctgagacaggaggatcgcttgagcccaaaagttcaagtctagcctgggcagtatggtgagaacccatctctacaaaaaattaaaactattagccacgcgtggtggtgcctgcctgtagtccaagctacttgggcagctaaggtgggaggatcacctgagcctgagagatcgaggctgcagtgatccatgatggtgccactgcactccagcctgggcaacagagcaagatcctgtctcaaaataaataagtaaaataaaatacaataaaatttgcctacattgaatgcctacaaaagccaaggttatttcttaggttatttctctcatttgatataatggataaattcattcaaatgcctcagtttccctatctttaaattgggaatcataggaatacccacctgcaatagtttactagggctatggtaacaaggtgccacaaactgggtgacttaaatgagaaacttactgtgtcacaattctacagactaggcatccgagatcgaagtgtcacagcactgttttctttctcagggctcctggctgtgtgctgggaatctttggtgttcctgatctctgccttcatcttcacatggtgttctcccctgtgtatgcctgtgtcccgtttccccttttaacaatggtaccagtcatgttgggacagggacccatcctactccagtgtgacctcattttgttttttgtttgtttgtttgtttgtttttagacagagtcccactctgttgcccaggctggagtgcaaggatgtgatctcggctcactgcaacctctgcctcccaggctgaagcgactctcttgcctcagccaccatgcctggctaattttttgcgtatttttaatagagacagggtttcgccatgttggccaggctagtcccgaacccctgacctcaggtgatccgcccgcctcggcctcccaaagtgctaggattacaagcctgagctaccgcacccgaccaacctaattttaatataacaaattatatctacaatggccctacttctaaataaggtcagactctgaggtattggggtttaggatttcaacatacgagttttggaagaatacaattcaacccatgacaccacctcacatggtttggtgtggattaaatgagtacaaaaattgctatgtgagggtttgctctaattattattagtaagtagatgtcttaaaggataacaacataagcaatgattactacttgagaacctactaagtgtcagatactatattgtcaaaaacttctaatcctcgtagaaaccttcaaagtgtgttttttatctccagtatcttcagtttacaaatgggtaatctgaagcttagagaggtgaaaagattttgatgtacctgaggcttcacaacttgtttatgattataaacaagactataatctctacttgatggtgaaactctttgaataatggaagaaggttttaaaaattcatacctccttactttagtttttgtgtgcaaatgcaatcttccgtataatgtattgagtttgcataatcaaggttctaaaataattttttagataggaagcttagctatggataaaaactgccaattcaacagataaaagatagtcattttgatcttgtcaataattactttaagacagtggcaggtacctgatttagttaacattcagtgaacagagtccctgaacctgtgctaggaatcccagtccaataaaaccttgctcctgccttcaaagagctcacagttagtttagagagtgtgctaaggggataggccacggggccaggcaagattcacggggccacggtgaggaagattcaggtttatgatgcgggtgtgaaataacttacttgggatcaatgaatcattgaagaattctgttttttatattctccccacccaggcaagagtgcagtggcacaatctttgcttactgcaacatctgtctcttgggttcaagggattctcctgcctcagcctcccaggtagctgggactacagatgcccgccaccacgccgggctaatttttgtgttttcagtaaaggcagtgtttcactgggttggccaggctgatctgaaactcctgacctcaagtgattcacccgccttggcctcaaaatgctgggattacatacgcctggtgtggaattctttaatgcagtgagaggagatgaaggccactttagctaagcctttaggttcattgaagaggccattcaaaaagatgaaaggtttgacatatacttccctatatcaagccatgcctgatttttcagaaataaggtagaagtttaatggatgtcatagtctaaaaatttgtaaggtaatcactataaatggagggaaaaaaacccagttattttctcttagggccatttctcatgggaattcagactagaataaaaggaagttatttataggatgtttaatacccagtccctcaccaggattctagatagaaaaaaaatatttctggagatggaaacgctggtttcagtgtcatgtggaaagttttgttaaacacctatcatgtgcaaaaaatgaatatcttctcgatttagaagagcatatagtctagcagaggaagatagatacttcaaactctccacctcacttgcctggatatgaaatacttcctgcttttgaatgaattacattgatgttgattaatgataatggaataacattactttgcatttggaggatgcttttaacatttcaaagtgctttccgaattatttctcctgtcaaactgtccaacaagcctggtgtggatgggggctgggctgacactggcactggcacagggcccccaggagcctgtcctagctgctacttttctggcaatgcctttcccttgcaatttcttcccagcccgcaccttctaccttttctctctagttcccacactgtgcttcctttgttttggtcttcctggctattgccttggattctctacatatcctgccgtgctctttgaagcaaagctattacagaaatgtaataaataataaatttcatcactcagacagatcaataaaatgcatgataagaagaggccattatggagagtgaaaaatgcgcaagaggatgcccacagcatgagtcaatctttagccaggagatgccaaataccaggcaggccattacggggtattttaagcttttatttgttagtacatccacagacatttgttgagggtatttttcccgctatgcccagggctaggcactggacattccgagacatactgtgtccagaagctcaacaatttagctgaggagatggatgatgcagccataactaattgtaatgcagtgccattgcctctgtagacaataggcagagagcagtgagagttcagagggggaaggaaccagctttggagaggaggggagagggggcttttattaaagcgaggaaattggacttcaattatacagtaagagcaggatttttctcaggtggaagagttgaagtaggtgtgagatagattattttcctcgggcaggaaatatcacatgcaaatatgatggatcctatacttactgacaacgtctagggattttttttggttcacaatttttattcaggtatttaaagtctttctcaatctgggacagtttagataagcagccttacttttccactaagcctgtttcccactaacctttttttttttttttttttaactgtttaaaaggataaggcccagtaagatagaagtgagcacaaaagcaaggggctgctgggctccattggcatagaatataggcagagtgggcttgggccaccagctgtctcctggggttctcaggcctggagtcctgggggagcctcttgtccttttcgcttctctagcctccttgaaggaagaatctgaagggagtgatccagccttattatcatcctggtcacatggagagaaaagatagaagggtgatgctctttcttctaacaccctagtttttgaatatatggcccaagtcagcatccttgaacttgaccagtcagtgacaatactcctcttccgtggaggaagggggaaggatgtggagagaggatgtattaatccattgtgcattgctataaaggaatacctgaagttaagttatttataataaaaaaaaagttttattttggctcgtgattttgcagagtgtacaggaaacaatggtgccagtgtgtgcttttggtcaggacctcaggaagattttactcatggcagaaggcaaagggggagcaggtgtgtcacatggtgagagagggagcaaggggggaagggagaagatgccagactctttaaacaaacagctcttgcatgaacaaacagagcaggaactcactcattactgcaagggaggcaccaagccattcacgagagatcttcccccgtgacccagcacctcccactaggtctacctccaacatcagggatcacatttcaacatgagatttggaggggacaaacatccaaactatatcagaggagcactgaattatatggtacggaaacatcaacttccaaccacaactttgttatgaaattggatacagggctgagataagatgcaaagaaggccctaggctaatagaagtttagtctgttacctccttaatctttttcttctgaattatcctcattcatttactctttattctcacctcccaggcacaatgctttagcctcttttgcatttctgccttttcctattaaggtagccattgataaattaattctggaaaaggagtatgcactttggagtcagaggtgggttcaaatccaagaactattactaacttagcctcatgaccttgaaaaagttgctaggaaaattaaataagataacataggtataatacacagtacagtgtcttgctgtacaagcattcaataaatggcatatatacatatattcactgttagtttttcactagtgatgtggtatgctggaaagaataaaatatgtagtatgatgttttacgtagaactgcttaaaaatgcctgtctcttctcctctttcaggtctctataaagtttctaacttgttttactttttaccagcaattctgtctcacttcctggcagacttatatttagttctctaatgctgaacacaaactgctaactgtccagccaaatccattctcttgttcccctttagtctgatcatgtcttctccatttctcagcctttttatagttaagtgtggccatcagactaagtgttcatgggtatggaatgtaagtagaagtgatgtgtgccatttccagtcttggccattaacttcctacaagcaattctctgtgttcttatcttccttccagacacctgggatggggatgcccggagcaatcttggaagccagtcagctgatctgtccctcagctgagtccctgaatgactgttgagccaattgcctcccacaacatacagatacatttgtgagcaggcacgtgcacacacacagaaacaaaacatttggaaataaactattgccttcaagccatttaatttggggtcattttgttctgtcagtttatcctaccttaatacccatttttatctatctccaagtttgactgagatcgctggaaaaacccaaattgtaaggtacttttgaaagagcactgaaccaaaagcagaactaggtttaagatacttttgcacctaacagctatataatctttttatttacctattcaacccttctctttcttactgaaaaaaaattataataatctctgtgacttagttgagctatttaacttcctggttaccaggttactcacttgcaaaatgtgtcatggaattattgtgcaaaattattaggatagtacatgtcataattttaaatttgtagagtcttctacagcttcactgtccaaaatagtagtcactagccatatgttgctattgagtacctttcttagtctgttttgtgttgctataaaggaatatataaaataggtaatttatacagaagaaaaggtatctttggctcgcaattctgatatctaggaaagttcaaggttgggcatctgatgaggcccacaaactgcttccactcatggtggaaagtgaagcagaaccagtgtgtgcagagatcacatagtgagagaggaagcaagagagaaaagtgggaagtgctaagctcccttaaacaaccagctctagcaggaatgaaaacagtgagaactcactcaccctttcccttccccaggaatggaattaatccattcatgagggattctcctccatgacccaaacacctcccattagtccccatctccaacactggagatgaaatttcaataagagatttggatgggacaaatatccaaactatagcagtacctgaaatgtggatagtctgaattaagatactctgtaagtgtaaaatacaaactgtatttcacaggtctagtacacaaaaagaatatcagatggttcattaaaatttaaaaatattgattacatgttgaaatgataatatcttgagtctagtgggttaataaaatacgttattaaaatgaattccctttttttcacttttagtgtgactaccagaaaatttaagattatgtgtgtgactcacattacatttctattggacagcctgctctagacataaagtattgtaatttagtgcaggcggatatcctctaatacttctgaatgtgagtcttgagtagtaggagttagaaagcaagatttctctaaatgggattgatcatccttactttgcagggctgtaattgggattaaaaatcatatatgcatagtgcctggtacatagaagtcactcagcaaatactagctgttgttctcccaccttttcctttcattccaaaagcagcttccacaatcacaggctatatggctttggatttttctcatttaggaagaaattattttgtttcctcttttaaattcattttttttaaggattggaagaacatttgtaatcacaaaaaaaagagtacactgaggaaaatgagataaaggaaaaccctgggggagaggagtgctggttcctagctgggatgagctagagttggggggaagatcttagcggtcactgcatgctgagtgcatcacgtctgtaacagagctgggagcaagtgttagggtgatgttgccagataccttcttttccttttttttaaaaaaatttactttaagttatgggatacatgtgtagaatgtgcaggtttgttacacaggtatacatgtggcatggtggtttggtgcacctatcaacccatcatctaggtattaagccctgcctgcattaggtatttgtcctaatgctctccctcccctttcccctcaccctgcaacaggccctggtgtgtgatgttcccctccctgtgtccatgtgttctccttgttcactcccacttatgagtgagaacatgttgtgtttggttttttgttcctgttttaggatgctgagaatgatggtttccagcttcatccaagtccctgcaaaggacatgatctcattcttttttatggctgcatagtattccatggtgtgtatgtaccacattttctttatccattccatcatcagtgggcatttgggttggttccaagaatttgctattgtaaatagtgctgcaataagcatacgtgtgcatatgtctttatagtagaatgatttataaatcttttggtatatacccagtaatgggattgctgggtcaaatggtatttcttgttctagatcattgaggaaccatcacactgccttgcacaatggttgaactaatttacattcccaccaacagtgtaaaagtgttcatatttctccacatcctctccagaatctcttgtttcctgactttttagtgatcgccattctgactggtgtgagttggtatctcattgtggttttgatttgcatttctctaatgaccatgataatgagctttttttcatatgtttttgaccacatacatgtcttcttttgagaagtgtcttttcatatccttcgcccactttttgatggggttgtctgtttttttcttgtaaatttgtttaagttccttgtagattctggatattagccctttgtcagatgggtagattgcaaaaattttctcccattctgtatgttgcctgttcactctgacatagtttgttttgccaggcagaagctctttagtttaattagatcccatttgtcaactttggcttttgttgccattgcttttgatgatttagtcatgaagtctttgcccatgcctatgtcctgaatggtactgcctaggttttcttctaggttttttatggtttggggttttacatttaagtctttaattcatcttgagttaatttttgtataaggcataaggaagtggtcaagtttctgttttctgcctatggctagctagttttcccagtacatttattaaataggaaatcctttccccattgcttgtttgtgtcaagtttgttgaagatcagatggttgtagatgtgtggtgttatttctgaggtctctgttctattcctttggtctattcgatttggtaccagtaccatgctgttttggttactgtagccttatagtatagtttgaagtcaggtagcatgatgcctccagctttgctctttttgcttaggattgtcttggctatacaggctcctttttgttccatatgaaatttaaagtagttttttctaattctgtgaagaaagtcaatggtagcttgatggggatggcattgaatctataaattactttgggcagtatggccattttcacaatattgattcttcctatccatgaacatggatttttttttcatttgtttgtgtcctttcttatttctttgagcagtggtttgtagttcttcttgaagaggtccttcttgttccttgtaagttatattcctagatattttattctctttgtagcaattgtgaatgggagtttattcatgatttggttctctgcttgtttattgttggtgtataggaatgctcgtgatttttgcacattgattttgtatcctgagaccttgctgaagttgcttatcagcgtaaggagtttttggggtgagatgatggggttttctaaatatacaatcatgtcatctgcaaacagagacaatttgtcttcctttcttcctatttgaatacactttatttctttttcttgcctaatttccctggccagaacttccaatactatattgaataggaatgatgagagagggcattcttgtcttgtgcccgttttgaaagagaatgcttccaggttttgtccattcagtatgatattggttatggatttgttataaatagcttttattgagatacgttccgtcaatacctagtttattgagagtttttaacatgaagtaatgttgaattttatcaatggcgttttctgcatctattgagataatcatgtggtttttgtcattggttctgtttatgtgatggaatacgtttattgattagcgcatgttgaaccatccttgtattccagggatgaagctgacttgatcacggtggataagttttttgacatgctactggatttgatttgccagtattttactgaggattttcacatcgatgttattcaggcatattggcctgaaattttctttttttgttgtgtctctgccagacacaggatgctggcctcataaaatgtattagggaggagtccctctttttcttttgtttggaatagcttcagaagcaatggtatcagctcctctttgtacctctgatagaattcctctgtggatccatctggtcctgggcttttttggttggtaggctattaattactgcctcaatttcagaacttgttattggtgtatttagagatttgacttcttcctggtttactcttgggagggtgtatgtgtccaggaatttatccatttcttctagattttctagtttatttgtatagaggtgtttataatattgtctgatggtagtttgcatttctgtgggatcagtgggatatcccctttatcatttttgattgtgtctatttgattcttctctcttttcttctttattagtctagctagtggtctatttttgttaatcttttcataaaaacaggtcctggattcattgatttttttgaagggttttttgtaggtctatctccttcagttctgctctgatcttagttatttcctgtcttctgctaggctttgaattcatttgcccttgcttctctagttcttttaattttgatgttagggtatagctttgaggcccttccagctttccaatgtgggcatttaatggtataaatttccctcttaatactactttacctgtgtcccagagattctggtacattgtttctttgttctcattggtttcaaagaacttcttaatttctgccttaattttattatttacccaggagtcattcagaagcaggttgttcactttccatgtagttgtgcagttttgagttctaatttgattgcattgtggttggagagactgttatgatttccattcttttgcttttgcttagaagagttttatttcaaattatgtggtcaattttagaataagtgccatgtggtgctgagaagaatgtatattctgctgatttggagtggagagttctatagttgtttgttaggtccacttgctccagagctgagttgaagtcctgaatattgttattaattttctgtgttgttgatctgtctaatattgacagtggggtgttaaagtctcttactattattgcatggaagtctaagtgtctttgtaagtctctaagaacttgctctatgaatctgggtgctcctatgttgggtgcatgtatatttaggatagttagcttttcttgttccattgatccctttaccattatgtaatgcccttctttgtcttttttgatctttgttggcttaaagcctgtttcttcatagactaggattgcaactcctgcttttttttgggctttccatttgcttggtaaatattcctgcatccctttattttgagcctatgtgtgtctttgcacgtaagattggtcttctggatacagcacaccaatgggtcttgagtctttatccaatttgccagtctgtgtcttttaactggggcacttggctcatttacttttaaggttagtatttttatgtgtgaatttgatcctgtcatcttgatgctagctggttattttgcacattagttgatgcagtttctttatagtgtcattggtttttatattttgatgtatttttgcaatggctggtaccgatttttcctttccatatttagtgcttccttcaggagctcttgatttggctgttgatacttgtgtatgcttcatgaagttctcatgctgtgtttttcagctccatcaggtcatttatgctcctctcaaaactggttattctagttaacagttcctgtaaccttttatcaaggtgcttagcttccttgcattgggttcgaacatgctcttttagctcagaggagtttgttattacccaccttctgaagcctacttctgtcaaatccatctcattctttgtccagttttgtacccttgctggagaggagttgtgaatatttagaggagaagtggaattgtggtttttggaattttcagcattttcgcactggtttttcctcatcttcatggatttatctacctttgatctttgaggctgatgacctttggatggggtttttgtgtgggggtcttttttgttgatgttgttgttgctttctgtttgttagtttttctttaacagtcaggcctctcttctgcaggtctgctgcagtttgctggaggtccactccagaacttgttcacctaggtattaccagtggaggctgcagaacagcaaagattgcttcttactccttcctctggaagctttgtcccagaggggcaccaggctaatgctagccggatctctcctgtatgaggtttctatcgacccctgtcaggaggtctctcacagtcaggagacacaggggtcagggacccacttgaggaggcagtctgtcctttagcagagctggtgcactgtgttgggaaaatcctccttgtcaggatcagctgttctctttagagccggcaggcaggagagattaagtccacagaaactgcggacttaaccacagccacccctccccctaagtgctctgtcccaggaagatgagagttgtatctgtaagcccctgactggggctgctgcatttccttcgaagatgtcttgcccagtgaggtggaatctagagaagcagtctggccacagctgctttgccatgctgtggtgaattcagcccagtccaaaccttccagtgcccttagcactgtcaggggaagacagcccactaaagcctcagtaatggccgatgcccctccccctagcaagctcaatggtcccaggttgactctggactgctgtgctggcagtgagaatttcaagccaatggttcttagcttgctgagctctgtgggagtgggacctgctgagtgagaacacctggctccctggcttcatccccctttccaggggagtggactgttctcctgtctcggtgggtttccagatgccactgggatacgaaaaaactcctgcagctagcttggtgtctgcccaaacagccgcccagttttgtgcctgaaacccagggccctggtggtgtaggctcaccagggaatctcctgatctgcggattgcaaaaatctgtgggaaaagcgtagtacccagggcaggtagcacagtccttcatggcttctcttggctgggcgagggaggtcctctggctccttgcatttcctgggtgaagtgaagccccaccctgcttctgctcactctctgtgggttgcacccactgcctaaccagacccattgagatgaactgggtacctcaactggaaatgcaggaatcaccctccttctgcactggtcttgctgggagctgcagaccagagctgttcctatttgaccatcttggtccctctctcgccagatgccctcttttaaaaattcttaaatgtatttgcagtatcaaagttgagactacttttcttctcctttacagccttttcaatatcaccatctccctaagtatgcagttacaagaggtaacttctctctgtatcttatctaaggaaactgagagcagttagcttctttggtatgaggaaaatgggttcaagtctagcagttcctatttaaagacctttccttagctaatgcttttctttaatcaaatcaccgccccttagattctaaaggaaacaaccattatcctaatttcaggaatgttttatttttctttgtttttggctgaagatccataattttgactgtctaatatgaagcaggtattttccaatacttctctctcagaaccaaatacttgttttctcctcatatctcctcttgtcttctctccttttccttcccttttacctcttccctcttctacccttttccttctttccctttttctttctctcccatttcctcctttccttcttccctctttcttttcctttgtttgttcacgtgacagaggtggaaagaggatgacacattaggaagactgagaaactatcccatttgtggccacctagaaaccagaagttactaagatctagcactaatcaatttcttctcaaagtaccgatttaccttgtattaacatggctttcaagatactctttagactagtgttcccctcttactttctgaatgaagactatttatgttttcacttgaggaggtgaccctgagagattagggtatatagtcataagttacttttttaaattatagctttatagagataaaattcacttactataacattcaccagtttgtagtatgcagttcaatgggttttaatatactcacagcgttgtgcaaacgtctccactctttaattgctttatttcttcaaccttctacaaactaagtatctattaatagacattttcctttgctttcttctcccagaaactgccaatctactttctgtctttataaatttacctactccagacatacattttctataagtggaataatataattgtgacttttgattttttattttaattttgtgattttgtgactgggcttttgtgactggcttctttcacttagcaaaatattttgaggttcattcatattatagcttgtatcaatacttcattctttttattgccacatatattccattctataaagttaccatatcttttttttctacttatcagttatagccgcttttaggatgtcattaataatgttgctatgaacatttatgtacaggttttgtgtatatatgtgtctttaattctcttgggtatatacttaggcttaaaagtgttgcatcatatggtatgtctatgtttaattgccaaactgttttcataagtggctgaatcattttacaatcctaccagaaatgtatgagggaaacaatttctcgacagccttgtcaacacttactattgtccatcttttttattttagcgatgtcagtgactatgaagtgtgtcttgtggttttgatttgcatttttctgttgattaataatgtttaacatcttttcatgtgtttattagccatttgtatataatctttggatgaatgcatattcacattctttgttcatttttgagttgtttgtcttttttaattgttgagttgtaagagtgctttgtatattctgtaatataagttccttatcagatatatgatttgcaagcattttcttccattttatgtttgtcttttcacttccttgatggtatcttttgaagcatgaattttaattttgatgaagcccactttatttatttatttatttgtgtcacttgtactttgggtgacagatctaaggaatcagagcctaatccttagaagtttctctcatgtctttaaaaacacatatacataaaataggatggtttgcaatttctaagcagttcttgtcaggcttcaatggcttccagacaaagttttggctgtgctagcaaagaagtgttaaaatcttattttcatagctagccggtggtgtgaggagggcacagctgctaggcatttggacactgcagcaattgctttaattggacattcctcacccctctagtctgacttgttaatggctttttaagtgagacacaccagccaagtgaattagactatttggcaagtcaattcctgctcacttggaagcgttaatccatggaaagtaagcagaggccttcagccaggaggaaacctgaatttcatttgcagaggtgaaagagaaagaactattgtctgcagtctcaggagtttccaagtacacttccaagggctgactggaagaaaggtcttcttatctaactggctctctctctctctcaaccccactttttcaattcagcacatatttatttttcccttcaacatggctatgaagcatacaagtgaggtctgtcgtggtgcctgccctgtgaagcatctatgcatgagaaacaggagaaaaatacacatacaaaataattagcaataatttgctaataatgtaatctattttctgttcactccttgacttagcatattctgacttcagtcaaccactctacttaaattgttctcttaaaaaacaatgacactcaccagtaacctcttaggtatcaaacttgatgattttcaaaatctgcatttgtagcttcgacctttcttctgggcttcatcctgaatttccccggcctgtcacacatctttacatagaaatcccagcagcacatctttcacacattgaaagtcaaacttctcctaccctttttttttatcgccttttccaccttcaacaatgtattctcctcctctgatcatggctaaacaactactttaattagcaaattctcccattatcacccgcatgtcactagttttagtccatttacgtgacttcctttctattcccactccttcgtgtaaactttctctttcctaaataatacaagttaaggcctcttccacacccaacttctctaatcctttgtctacattttggctagaatcatttttcaaaaccacaaactttatcctgccagttcttttttcacacatcttcagttattcttcagtgcctggagaataaggtcgaaatctttgagctgcttttgtagacctgctcattcttgcctcaacctctctttctagccttgtctcacatagcactaaacccttcactgttctctcctcacatcatggtcatctgtacatccactctctttcctctccctgaaataccctttcttttgactgtttggtaaactcttagtcattctataagttccccaatccaaagtgaacttggaaagtcttccttgagatccacggcaacttgcgtagacttctgttatgattcttatcatacttctttgtgcacaaatttttctcttgctccaatcccttactcttgtctcctctgatgcatttttcaatctcttgctcttgtttattcctttctcaaactctctctacaccatacctccatctataaaccgttctgctcctagataagcagggactgtcctgcctgtgcaccttgcttagtgcctcactcagaagatacgctccttaaagggcctaaggaaggaatttgctgaactaattatgattaaaactatgattaaatctcacccatctaaaggcaaacatgctcaggtttcaaattagtctgaagtgtggtttaaggggctttttaaatgtgacagtttttgttgttgttgttgatagatggtggggagcgttggtatggtgggaaaaaaaccagaaaaaccaaatgtgaggaatttagtgatgcagaattgctgatggagggccagaggccatccctggagtggctcatctgaccctgtatacgatgttcgtttggatgggtggctgtattgtaatagtcacttggacactggctttagaagtcagaagagatttgactcaaggcttttataatatgtctctttcatggtcatctgcctaacttatctgaacttcagaatctactactgttatataaatgacctccccccaaccttgagggttttgtgggaataaataggataatgcttatgttgtgtttagtcaagttctttcatgtggcaagcacttaccaagtgggagctatttcatgtttacgtttaaaaaagtgtgtatctgttatctaaccagcctgggaaaatacagatgatatttctattatattttaccagttcccttgaggatggcccccccttttttttttaaatttcttgggctggggaccaagctctcattcctgaatgctatgagtactgagagagatgtgctgtcaaagccaatgaacggcagttgtacacactgacattttttcagaatttgtccttgggggtatttaagcagcaatgtccaagactgtaaacacagctgagaaatgctgttattacatttaagaatctcttttctgtaatattaagacatcttgatttaattggtaagccgctctgtgatagcattcaatttaaatgaggtttgtcgagtggagaatcataaggcaatctctcatggaccaaggattgctgatgaggtctaccttattgccatgtgtcagaaattaaatcactgtctattatcatgaaccagtcaatcagattctctttttgattagaatgcactagtgggggaggtagagaagtgagaatttaaaagaattttaccacttccatattgtgttgcttacttcatggtattagaaatgctgttggctcactatactagaatattatcaaccagtattttcataggaaacaaaaatatagacatacacacatatatacactaaaagaatggaaatctgaaggaaatagagaggaaaatataattttgtctttaaaaaatcccagaagcccttagactcccatgattaggattatattcaacttatacattcttctgtgtcattcttccttcagtaaattaggaacaactaatatgctctgcctcctttctgaataaggaagtataaatggatgttactgaattccctcaagtcctgggcaaatacactatcacaatgtctttggtttgcatgaagatggaggcgctcatttataatgtgaagcctttcaccgttaaagcttcacgtgaacccgaactgacacagaatcaaagctttcatgagagcaagatggaaagagattatgtcaacacaccccatcccaaaatgttgtaaagtgccagacttcttagggtattccatgacactgctagaatgtttctcatattcagtcacgtagatcattcttttactatttgttttcttttagatgagttcaattggagcctgcccgctatggaaaattattgatgcaattacattaatcctgatcaccatggtgatgtatagttataaaattggcttaaaatactgtaaggcaggaaaactaggcaaccttaactcttttagcacaggtggccctctttgcagagcattctgactttcttagtttccaatattctagcagatggcatgggtagttgggcacaatcaattttcttgcattgcctcacatcttccagtgagattttgcggaagaatggtgtgtgcaccacagatcttgggatcattcaaaggattctcaaagctcctcaatggccaatcagcagtgaagagggaaatggtggtaaatgaggtagaagccctctgtgaatgaagtaatgttctggaaggggctatgcatttggattttcattctggtaattttctctatgaccttggaaaatgactttatttcttcgcttttgcagatggaatgaattataaaaatggttctgtgaaaccttgaaaccataaaatgctatacagatgctaaatatacagaatttagcacgcgattttcctctgttcttaggacagttactatttctagatccaagtggatcagggaagaatagtgctctaatgctctgagaaggaaacgagtgttaagctggatactggtgtgcttagctgcaattaaggaagctgctgtggaattagtgactcacccttcatcaggatggaaaaactgtctcatgccgtgtttttgatttctctcccctattcagtttgtttgaagtctcttttgtgataggagaaaatgacaattactctcctcttgtgtttccatttttggtaagcagtgggcagagtttacattggatgaaatttcaaaagctgtttttatgaaaaatcacttcctctgaacaatgggaaaatggtgagagagagacgatagttggcttttagtctaccaggttcaacctcctgcaaaagctgaattcaagactgccctataggcattgggaatctagttaatgccactatctgcctgtgaatttcctgccttaaactgtctcggattatacattaagctggttttttttcccctataatgtgtcagaaaacaaaaattcaacaaactgagcttacagatctaattggcttttattagtgattcatgaatccgttcgcatcccatctgtgaagcaacaagggcctcttcagggtgtggcagaagagtggttttcataaggcaacttgagcaggaacaatgaaacagcaagtgcaaaaaatgattggttaacatcatattacttcaggttactttccttgtataggctaaagcacaggaggcttccttatcatcctggttcagctagccttctgcgtggtttctgcaaatctctctctctctttttttttttttaaactggcccatttgtaagttcagtttgattatgtggcacctagcacaagtgacaccattctggtttggtctggtctgttagagccaggagcctagtccaaaacattggcatcccataaattttattcaatgaatgtttcctatacccctgtgtcaatttcatctcctacatgaatccatccccctccctttccctggccccttatactaactgagttgtttgcgcttgggaggaatacaaagtattttcaatacatggctagcatgaacaaattatagttaaatgatacattttgtagaaaaagcaatgcacactgaggtcatttgcctgcagatgttaaattatctgcttttttgtgttactatatatgctgtagcacttatccactggtgtaaataagaaagtcaattgaactctctctgtctggagagagagaaaatgagattgagaataaagtcttgcagaggttgcagatggccctgtaaggctgaattcagcccttgcgtatattttgttcagttggtacaaagttaaatttaaatgcagttaagtggctttcaaatgcactttgctacagtccccactgctccttagtgtcttatgccctatatgtttcactactttgttgcctacgtagtttctgaatgaacttgaacttgcaacccctcgtttaaaaacttgttcctgttatgaaactgtgggtgcttatgctaaggacttaatctttctctcttgcgtgggaggaaaggatatctataacagaacaataattgtaaactagaagagtagaaaaaaggatgaaagaaaagggcaatataaaaggcaggaaaagtaggggtataagaaaataaaataaagatcaaatacatttattactatgagagcttctatgcgggaaaaggaaaaacaaagtataataatacaaggcaaccacataattaaataattttttcaaaagactgtcagtggtaacacacacacacacacacacacacacaattaggaaaagctacaaaagagccccaagtctaacttggcaaaattgaaagtatgtgatagttttaaaataaaaattaaaatactttaaactagtttaaaaatatatctctacttcatgtacatctgcactgtttgacatgttataagaagtgctaaattatcttaataatttaagaagaaaagaaaagtaatggtcttccttctctctctccaattctaattccttggaatagtcgtttctaaatagattgcagatatgttcacttttcaacattgcttatataagagaaggcaaggtatttagaatttttcttgatcataacaaaaagacactgaaactcagaggcagcaagaggccccattatgggggcaaagagtagcagtggaaatgaaagtgagttcctgaacaagttgcttccaacagggtaggtgtattttgaagtggcgttgtaagtggcaccctactgcttccatgagtttaaattgtatcaactgaatataaagtataagccaattttaaaatgagaatttgtagaattcatgtgattagattagaggtttttaaaaagtaatatttgaattttgccaggggggtggggtggggtatgtattatgtgttcacgggatgacagcagatatcttcaaggaagtggtttggagtacattaagttctgaacacataaaatgactttttttttttttcctttttggtcttcaggagacttgagaaaacaagtgctgtgtaagttataaacaggatgaatggaatagtgatttcacaggagttagaaaaatactccagtcacaaaagttaaaattagagtaatctgaggcattctcagtactttggataccctgtccacattcagggctactgattatatttccaaagaaacttataaaaccagatgtctagctggcaattggttttgatgaatctccaaatctcagcaatgagaaaatttgacagttgtcagacagcagctagctattacgagtgagccagggaattttcttatctgttacaagtatagaaccattacagggagatactgcatcatagtgtcatgtttataaagaaggcttcagagcacatggtttaatccccaaatttctaagaatgacagttcattttcttggatgttgaaaggtgctttaatacctatacaacatgaagatggttttattatcaccaatcaaaatgtcttggtatttcttaatttaaacaaattcattttataggaattacattgctgagaattcacaccatgacactgacgggacttataatagtggttctaaagcctgcatgtgcgtcagaataatttggggatttgaggtgacttgttaaatgtacagtcactgggtagccccctgtaagattctgatttagtacatttggggtggaatccaggcatctacatttttaaaaagcaccatggccaattctgaatcatggtcgggtttgaaaagcactaagtttgggcaggcctgatttatttcaaagaattttcaagcatatttagttgtgccgttcagtaatagtagcttctcttattactgtgtgtatcccagtaaatctcttccccatttactctttcatcgccccactttgggttcttctgctctgccgccatctatttggcctgtacccactgttcactaatgaaagcccgtagcttctaaaatgggccaagattcacagttgatataagctgagaaagactgacaagttattctgccgaatgatactggaaaaaagaataggatagagggctaatgatgttattttatttttgtccggtatctttacacccttagttgctttttcatttgtcaaatggaatctcatgtggaatctcgctctataaagcagatgaaaaaatgtggacccagtctggctgccagtcctgcccacttggtttccctctgactcagacactggtatcccaggcccctttgtctcatgtgcccctgaaaactgctgtgacatttaagcttttgtgtctcacataaaggcaataagcatattgcaaggttttcttttcttcaggtttcaatactctaacagatatgttctcaaagtagaattagtccttggttaaaatgagtcacatgtaatctaaagtgtttttcctcataaacccatctccagcttttatggtgaaattcaattgtaaaataagatgaggtgttaagtttaatttttttgaagaagacgttcattccataaatatttatcaagcactctctagttatgacataattcagtttctaacgtacagtacacctcttacaaaattgcataatctttaaactgaaaggccaaatatcttcatcaaatactgcttcttcagatctttgcttcctcagctctttaaagaaatgggcacctttggcatggatgggtttatatccagatgataattccagagccatcagggtttcagtttttgctggcaaagaaatcaattttattgctactcgaaggctcccctgggatgaagcaatattggaggaggcaatgcattctagaatgtcaactttcagaggtttggagtttgctcaaaaaataaatgatctctgacttgattaaacttcttttgagttcctactatatataagggcctgtggaagggctgggtaccccggcattgtaagatgtgactgcagccctcaaggggtttgcagtctagctggaaagaaggatctggcaataagaaagcacagtgagcccaaatgaagtgttcagattccacatactacatacagaatgcatcatgtaattgaagaaatagaaatcaccaggttacatggcagacctaaaaaaattcagcaagtctttttgaatgtacttgtgactgtcaacatttacattgtccaaaattttcttgtcaggtgagggcatcaaagaactcttaaacgctttcaaatgtggtgggagcatcttgcttctgtgagaagatttatattctccctaccttctcaattctgtttccctatcttatatgctataaacaaaacctcgctcacgaaaataaaagatgaatgcatgttctgaaagaatacagaatcatgacagctgaaatggtcatggtttcttttaggagatgaaaaaattaaatacacaggtgaaaacattagaatgcaattctctaggttaccatatgcttacaaaaaatcaaaaggagctgcagaaatggaaatttctaatgacagaagaaatcaaacagcagatacagtagagactttagagataaatgggtgtcaatagtggtaagaacacaggttcagaggagatccaatgttccatctaaatcctggttctgtcactgagtgggaatgattacttgatctttctgtgtcctcgtttcatgtgacaatatctatcacatgcagtgttgggtaaaacacttagcataatgcctggcacccagtcaatgtgcaataaatgttggctattatcatcatcaccacctccatcatcatcattctctaataaaagttaagcccttctctctgttgaatacacccatcagttaataccagtggctccttttaaatagcttaaaagcaaccaacattctatagatttcagtggggaagattgtaagtgaaatgggtgttgtgacctttcttgaaaataacccttctctctattagtatataaatgctagtgctgagtacacatactctgaagttgaacttaattaatttggggcagtagcattttcactgttgatgagcttgtatttattttctttggtttacaaagcagctggtgttgtccaaaaatttagaaacccctttccaaaatttaaatgacccccttcattcccttcatttacactgttgttctagaacctgggatgacactctgcagggtgaatggagactggtccctctgtcttcttttccatctctcttgctttagttttgctttcttcttcttctttttctttttctttttctgactgaagcatggaataactggctggtgttcattgagctaatttccttacctgcttcagggcctttgaacccaaagacctgtaggtgatctgtgactatggcaagcaggaagccttggggaccactcttcacatttggagtaatcctggtttgaaaatgtgtgagggaagccaggcaggcagagagcactatgtggctgctgagttagaaaatgctgaaatggaaagatgctggaatagaaaatcaaatgccatttattcattggcctacactttcactagtaccttcctggcagccttaagcgtattctttgtggtggtggccttttgaatgtcaatctgtggaaggacttctgtttttagcaaaggctgatctttaaggcaattaggtaacagttaaagtaatagtccccagttattgaacacttgctatgtacagggtactgtgctcagcactttccactatttcattcaatcacaacaacagccctatgagatagggtattattatcatcagtttgtagttgaggaaattgaggttaagggataagtgacttccccaaggtcacaggaagtaagtcgtggagatgagatatgaacctagcctttctgatttcaaagcttgtgctgttaaccactttgctatacttcctcatgtgtgtttaatagggtccagtttctactgaaaggatattttaattttgtgataaaacaggacaggcctaaaaaattaggtgcagactctgaataaatttaatatatctacccatctctcttattcctcttaagctcactttaaaaaatctctttttaaaaggaggttttctttttaaacctaacaataaaccaaggacatccgtccaagttaataaatatgtgccttttttaaaaaatagaaaaaagtctaattgacaagtaaaaattgtatatatttatagtgtacaatgtgaggttttgatacacacacacacacacacacacacacacacacacacacgctgtgaaatggccaaatcaagcttattaacatattattaactcaggagtttattctttatattatattcttaaaatctaattgctttgctatttttaagtatatagtgttattattaactattatcttcatgatgcacagtaggccacttgaatgtgttcttcctatccaaatgaagtttagcccccctccccacttcaagtatctgtcttttaatggctacataatatagtttggatacattatattcaattagccttttgttgatttggatatgccataatctactcaagcattcctttattgatgggctttcaagttacttccagtttgttgtcagttaagtaaattgtttacttgaaagcttccattgtctgggtctctaccactatgggacccattttgagtgttggtgatgctcacacaacaaggagacacaagcccggagttgagctcctaggtgagagagccatccagtagccattctggtccaagtcctgtccctaccacttacctgccacgtgcctctgcacaagccatctggcctcttttaagtctcagtttcttcataagaaaaatgagaaaaacagtgctgctctcaaagaatgaccatgaggacaaacagaataatgtgcatgcagggctgagcacagaacctggcatgaagcaggtgccaaacagcagagcaactgcattgctggaacccagcagaaacatcctctcactggagcttggatgggagctctctgagggccctaactcccctcttttggcctaatgcattatagggactccgtaaacatttgttaaccaaaaaatgtttggaaaactactactgttctgagcggtatttttcgtttcctttctatatttttattctaacagtcactaaaccacattttgagagtatctggaatggagaacctccagtggtttaaatagttttaccaaggaaatgtttttcacgcggaaagaagactgagatgaaacttatagagaccttgcctcaccctttcatttgccgaaaccatgtatttttgaatctagtgtctgagctcttaaccactaagtcatattgctttaataatgatgatgtgataataggtaccatttattgagcacttactgtgtcccagaaaaatgtgctcagcacgctttaccaatgatcccttaatcatcacagtaatcctgagagaaatataccctcattgtctccatattctatttggggaaatggaggcttaaaaagatttaccaaattttcccaggttagtggaaccagtactccaacccagctctgcctgacaccagtgccactgtgctaattccatggcaggctgtggtgactatgtatttattggactctgttcatatggaaagttgtatgcatacagaaacaggaacatttgctgtaatacttaagggagtgaaagaggaatgtacagaaggctaaaagaggtgagtattgctttgtcaattctaatgtctttctatgatgttgatatttggatcatctaagtaagtgctatgatgaaaataatattcaagaggctggtctggctgtctgtagaatgaggtagatgtagtgaaagctggaatggaggaaagcagctaagaagctattgtagtcgttagacattgaagtaaggaaatgtggaggagaaagatggcagtggaattagagacaaattgacaaacaagcgggtagtaattagaccttcatccaatcacttgtggggagtggggagcatggttcatcatccttcaggatggatctgtccctggagattggaaacatgcacgcacacatttcttacttccacgttcaaaactatggtgagcattcacagctggtatttcacaacctcttggattcatgtttattatatcctggatgaagaagcacttcctttcatctgaggctcactgggcccagggttgtgtggtgacctaaaggccgtatctatgaggattttgtctaagagtacctcaggtaagggctctcaggaacagcttcttagctgagccaccatgctccagatttgatctttaatcttatgactatagagaatgaatattttcaggtgactcagttcagtctctacctcatgaaaattaaattgaaaaaacaatatagagattatagttcaagtcctctgctactgtttaactgtgtaaacttgggtgaatgatttaatctctgtcagcttcagtttcctcatattagcatgggatggtccttgtaagatactatgttggttaaatgggcccacgcatgcaaagcacctatagtgcttgggacactgccaatacctaataaatattatatgctaatatttttatgattgaactataaatcataactaccttatgtaatatttttttatatgggtatcaagtctaaaacctccatatcaagagctttctgagccctttttgtcacctcgtctttcccctaccccaattcttgtgttgaggttattgggaaactgcactgttaatcagaaggtagctcagttaagtgtggactcaacgaagaaagaagatcattgagatgtgtaatattgaagacctgggaaagtgacaaaatatttatatcctacaatagcagaagcctttatgtcaatggaattgatttggtttctcagctccactgtctcattcttttggagacttctgggtaaacacattttgctcctctgaacactgtatttctcgaatgttcctccctggcagtcgccatgttctttctgtgaatttgttagaatcacttattaaaccaaagtcagggtcaccccttgtggggcttagaagtgcttttttttttttaagccttttatctgttgatgagctttcgtttctgaatatgaatggtatttggtcaaggtaggaagaggtttgaactagaacaacaactaaaaggcactggatggacaaatcatatttaaatgtaacggctgtaatcagggaagttgaaatagggagataagagaggttatccaaagttctgtgttggttggataagacattcaccgttattattttgtacaatatacagaaacaattgtctactcatacagctggaaggagccatggagattacctctattccccacattttacagatgaggaaacttctcagcgagtagataatagcctgaaattctattacttagagcaagcagggaaagtgttaggagggagttggggttagctctaggcagccacatcagcataatagtagtggcttcaatttttcttcatattgcactgaattcatttgtagtaatgaacctatctgtctatctatattatagtcatcaaattatcttcagtaactatgtaggtgttattagtttaaacctttaagacccatgaaaatacttgggttcaccaagcacgtctgccatatgcacttaaggagattcttcactgaatagtaattgtagtaactgctgccctgctcttgtaatatcttctataaaaataataatttgcacttcaaatgtctctttctgtgaggtgctcggcgtaccttgcaggaatcgcttacctaaatctatccttcaaggtggtgtatggaatagcttccagtggagtagctcagtaggaggagggaagagtgctgagaattcctagaatgcaaacctaaacctgggtttgttcagacataatccttagttatcacattagaataacaccttatattttcaaagctctttcatacttattgaattaatagagccattaaacctctctgaaatagtagtagtggatagtgtgacaggtgattaaaaccagatggagaagccttttttgaccctaacaacaccaaactgattagtgataaagccatacttcaagatgcttgactgtaactctagtgctcttttttttttttttttaactagattatattagctagagatttttcttgataagacagtggtacttttaaggcctttattcctctggattacaaaaaagtaagttacctattcctgattatatgaagcaagttaactgtttcaggaacatcaagagacctttaccacatcacaataaaactcaaggtcattttgctccaggagtacttatacaggtgatatttgacggtagtacatatcttgaagagaaaaaaagtcattttggctagggtaagcacagctaaagtttgacacggcagcttcaatgaatcatgcctctttttatggcacaattaaattttttgagaccaactgtgattttatcagctatccaggtcatctgtaggcaggtcatgattgttacatggggtggtgataattggtacaaggtcatgccctaagcatgttatagactagtagcccagcattgctaatcattttaaatcaagactacaaaattcaactgtagcatttcacttcagagcaaaaacattgcatttgcttgttcatgttgctatttcccttcccctccatgtctttctctccccaattctctcaatttgataggctgtaagaagcttcgtacccaccaaatgcaaccatatttcccctcagctctttattacaaacatgcacttttatcaaaaattttttaaaagactgaaaatgagactcagaatcttttatttatcacagaatggaccctggctcagctgcttattgactgcgtaaccttgtttgaatcagtttccgtacttagaaaataaggaaagtaatacttgcctcatagagtaattgtaaggattaaatgaatatataaaatctcaagcttagggtctagaacgtagtattttttcataaatgtaagtctctgtgtttctcaaatagttgtgtgcataggtatcacctacattgcttgtgaaagcttcagattcttgtgctcattcccgctccctaaggattttggtgcataggactggttaggacctaggaatctgcagctgcacaggtagatggtctgaggattatagttagaagtgccatgctgtaggttcaaagcaaatgggctgtataacacattcttcataaatttctgggttatggtcaaatttcctacgtttttcagagaaagaaattatagtgttcagggggcacttaactggaaataggtagcaacagaaaactggatgttgttgaatttatttattaattcaccgtatgttattgggcaccttctctttggcaaactttcccatagctgcagggaacacagtgataaacgaggtagagatggaggcagagcactaagtgagtaactccttttcctgggagcccagggctctattacccagggtatgctgtcttcagcataaggatgactctatcaagtaggtctgtagatacttccaagtctttactgccgaaactctcgcccttgccctagaaaggtgttgggtctcaaagggagttgtctcagaggaagggcaacctgcagcctttattttattgggaccagacccagcatccctggctcagattcagatttactgttcttatcatcagatgtggaataaaggcttctggaacagcagatgtggttttctacctatgaaagtaacattctctaaagcctagaggatggaacttgatctctagggataaaagagcaacagttgctcttaggatcttgtctaacaattggcttagtaggtgctaactccaattctcatctacctgctccatcttgattttagccacccatctaagcttccacttgccaccctttctgtgattatgccagccaccgactgtgctctctttggtccctcttggggcagagacaatccagaatgttgggaattacctgaactctcatctcatttgtctctccagccatgtgttaggctctgtggccacccacaatctcaggcccagctgttctgtaggaccagccctaagtggcccagagaaatattttctttgggttatatccagtaaaaggatatgcggatatgctcgggtcttgttgagaggcagcctggtaaatggagtgaaaacactagaagcaggcaatgccaatgtgaagtccctctgctccagccagcttcccaaccttggccaagtgcccactttctcaggagtatcccacctcccttccagaccagaaatgccgtagggcttgacagccaatttgcgctctctttcctacatcctgacctctttgactcaggtcccggaacttttgatccgcaattatgaatctcaatatacaaccccttgatcatgaccccttgcctcatggaactctctgtctcctctgtctagcccctgctaagcttcgtggactttgtcactaatctacttcacctatggtcttgctaagttgcttcctctgtcacctcccttcccagcccactcgagctctgtcctgccactgtccaaagtcaaaagaggcagaactaccttccttactttattttctttctcctctactttgctctttctttctctttaccagaacagagcatctgcaaccactctcactgcatttttttaccacgttttcttcagagtctatctgaaaatgaaatacagatttttttgataaatatattttcatactgaggttgaataagaatctgatctttatgattcttagacttgaaaaaatatatattttctgaaggaagtagactgttatcttcattatcacctccgtaaaattgcaaatggtcaaaaccataaaaaatggctttgctctatgtgtaataggcaaatgaagggaattcatggcaactgaaacccttgctttaaagtcagctctttgtgaatggaaagcagctgatattctgtaaatcctccccagatagggtttcttacagaaatactggcagactctctaatgactgtgactgctttgatatgaggatgtggtcaatatctcaagaaaaaagactgcaactttctaccttctgcagtatagagaagagaaaaggaagtatatgatgttctcacatccatctaactgagcaaccaaaatgctttataattttttaattgatttgtctggaaagagtccgttccctataggactcacagatctccatttatgtagggaagaaaattgtagtcctatccccatggctgcttgaaattccattattgatgtgatgagctctttgttcctcattttgatacagataagatattgaactgaagaaaatgcacaaaatatatctttctccactaataaaccgagaagtggtagtggtgccgtttgttaatttgggatttattttgctttgccaaatggatttgccattaatttcactaaggccacacaaaactctacatcagtgacatgcagaaatagaggtgagattgtccagtaagtagttgccagaatttgtcttgatgatgcttgatgcagatttaagagagagaaagcagatgcagtgtgtttcactggggtgccagagccagggggactgagactgccacaatgtgtgggacctttcctttctgagcacagcctggtggcagtcagcctttccctccagcccccacacaaaacaagtcggtcaagccatgcacgagtgatcttgatttgaagagagagaaagaaatttgatccccaagtctcagagctgaggtacttatgcactgaactccaagaggcatttcatttctaactagcttagaatttcccacagtttgacagcaacccaaataaagaaaatacttgaggaagcaaagtagatgtgctggaagttgagggcattacctgatggctgaatgaatttgacaggcttttctcctgttgttttgacacaattgtattttcctctacaccgctgatggagtgctctgcctaaccacgatgtacccaccttccgtggctcagctgagggccactttgtcaaatatctccatcttactcattcctcgccgtggccctctcccaccagggacctcccagatcactctgtcacccccaagactacacatttcggcactttatgccgccttgtcttaccctttttttcatgttttattgctgcatggcatttaatgttattactacagcaaaactgtatttccctagagggagggaatttgacttgttctggtctcaaactctaaactccggtcagttgtgaagaagcctggaaccaaatttgcagcccatctccaggaaagtgtatataattgtgtggtggatactgtgggtcatgaccctactcacggctctatctaattgtttcttctccctcttcccccttcctccttgttgtcagtcttttctaagtttctttcaatccttttagggattgtatggagtataaataaccttccatatgctaagccagaagttaccaacatgggtgtttcctgacgccaggcaagtaatgtaatataatgactcagccaagggaagagggcagggcttatctctgcacagctgcagtcacttgtggccatgctggaatgagggccctttgttgccaaattttcagatttttcaagagaagttagaaatacagagtcttaggcaaacttcacaatatttaaacatagacagctaaagtatgggaatatccttggtgattcccctaacctggaaaacatatttgggtgccatattcagtttgtgcaccaccggtttgcacaacctgctttaaagtttcatttggtaggtatccagttataatggaactgactctcctactgtggctttcttagtataaggccacatgccatgtgctgatcagcaaacgctgttgaaggattttgaaaagactggaaaaaagaaaactggttgtctagttatctgaagaccctgggctgtgtcacatccactatgaatacaccctccaaaatctgagaccttgttaatgagccctgtcttctctcccagattctaactgctcttcagcgttgtgacttagaggggatgccgtaatgcatgtgtgcctggaacccagggaggcagaggtcctctttttcaccctaatgtgaagcatgaagttagaatcatctctgtgctccctaatagagcctcatgcagagctgttatcattctggataagggattcatgggcatttgcatccataccccccaaatagtggttcctgagaaaatttctctgacatgctgagaaaaaataaagaattcataaagttgaaattattgaacttattttgatattaatgtacttttttactctggttgtcccaaaatatctcattgggtatatttacttgacaaaatgaaaagttggcaactggccaggcacggtggctcacatctgtaatcctagcactttgggaggccaaagctggtggatcccctgaggtcaggagttcaagaccagcttggccaacatggtgaaatcccgactctgctaaaagtataaaaataagccaggcatggtggcaggtgcctgtaatcccagctactcaggacgctgaggcaggagaattgcttgaacctgggaggcggaggttgcagtgagccgagatcgcaccactgcactccagcctaggtgacaagagtgaaactctgtctcaaaaaaaaaaaaaaaaaaaaaaaaaagttggcaaccttagaacagttcctgtcatctctctttattgtttcatttctaaaagagtttcatttggttgctacccagttataatgaaactgaaatccacagtggtctgtgaaatccaagtctgtggccagatttgagccacaccctcagttaatgacagggccgggagagggagggaagggtggaaatgaccaggaacaccaggtacagatagaaaatgtccatcctcagtaagacgggtcacctctgtgaggggtacgtgtcctcattcagtccatactcaaaagagatgtatccaaaagctgttgtaagcagctcaggttttgggggcaggggctgaccttttctagtctttgaaagataatgtattactcttgagaaatgtagaattttattgtcagtgtgcttgaattcagcaaacagacccggagatgaacccaagggacaacgggctcaaagaacatagatgataccatggaactttgacctatttcatatgagcattcctgggcctgcatttgggactggctgccttgtttgttttataaattgatcctcatattgattccttacttgatggctgtggaaaagaagtctccttcttgtttgaactcatgtctttgtgagctgcctttatgcttattacataaaagtctccctgattcttgttgatttggcaagagacttccttgctgagaattttgcgggctgtggtatgggtgtaaagtggtttgctgtaatggaacagcttccagaagagaatccggtctccgttttgaaatgccacttcttggaaccagaagaatttattctaggagggagaaaagaattattgataagttcataattattcacaattatttattgagtacccactctataccaggttgtattttagacactagggctatagtaaccactaagcaaaatgcacagaaatgcttgtcttcagtggtcctatgctttattgggacaaaacagatcagaaacaaaataaaactcacaacatataagaacattacatagtatgtgagaaggagacaattctatctggaaagtctagcagagcaagtgtgatcaagagtttacaagaagggattgctgtttaaaccagggaagtcagattaggtgtccttgattaagtgatagttgagtgacagtgacaactttatttatgctttagaaagactactctggctgctttgggaaaagactgctgaaaagcatggagacctgtcaggaacccattgcaaaagtccttgcaggcagcttggagcagggtggtggcagtagaggtggtgagaagaggttagatttgggatgtatttcaaaagcagagccaatgtggatttccaataaactggaccttttaataaagctgagagagactttacagatcatttagaccccttccgaggccaagtaggtagcacaagggagtgaaactagctgcatgacaatagaggctcttagaaacagggtgcattgtcttattacattaaaaaaattaaagccgggcgcggtggctcacgcctgtaatcccagcactttgggagggtgaggtgggtggatcatgaggtcaagagattgagatcatcctggccaatatggtgaaatcccaactctactaaaaatacaaaaatcagctgggtgtggtggtgggcgcctgtagtcccagctacttcggaggctgaggcaggagaatcgcttgaacccaggtcgaggttgcagtgagccgagatcgcgccactgcatttcagcctgggtgacagggcaagactcagtctcggaaaaaaaaaaaaaaaaaaaaattaaaacaccgttcaagccaaattatatctgtaaagtcagcctatgaacttctaaactacatcctgtaagaatcaaacccattctttttacagatgagagatacggggtcttacaaagtttattgacttctccaaggtcattagaggcagaatcagaatcgaagcctcaggcttcctcatttgtagttcagagttcattcattccatctgtactcgaaccatgaacagcttttcctccttggtgctgctctgagtggatgccacccatgtagaatattcttttattttcccactggtgtagcgtgatgggtccattttatttttctcttcatctctatcatcaggtgtcatcttttaaaacttgtgagcccttggctgtcccagccacccccaaagaacacccttgggatttactgattggctcacaacagtaattgtgagcaatgaaagaataggctaacttagcctcctccctagtttggttgatcacagcagagagaggaagactaacaaagaaggcctatataaaatgggaactgagggctatcttttgcttttggcgtcttgatggatgcctaaggtggatcagtatttgtgtaacataacaggggtactttacctgtggggagaggagtgaccactgaaaacactgttcaaaggggtcattcatagtcgtgcatttataaatttttttaaaaatagctttcttttcctattataaaagacatgtatcttggtatatagaataatttgatatatttgataaagaaggtattgcctgggaaaggatgttgagaagattagctatccaggggaacattaagttgtattttcattttacattgttgacagaaataaaaaccttcatggattaaaatttaaacagaaaatacttttaaaaactctaaggaaatttaaccaatatttatatagagaaagcttttgaaactttaaaagcaatgaaaaaaataggaaaaaaaaacaagtaagatttatcacatgaaaattaaaacacaaacccagaaaaatattcacaataaatagtgaataaaaagttaacaaccttaatgtgcaaagttatctttttcttggataaaaatcccatggcatcaaatagagctgagaggaagagctcacagttcatgaaagaggaaatacaaatatggcaagtaaacttccaagaaaaggtggaacttcctagtaatcaaagaagacaagttaaactaaaatgaaaaccatttttttttgtttgtcagattggtaaaggttaaataaaatttttaatacgtaaagtcagcaagttaagacagcagacctgtttacatatgcctggtattaacataacgtggcatatcggtctgaaaagcaatatggcaacatgcactgagagccttaagatgctgatattcatcaatccatgaatctcacttttggtagcaatctaaatatccgctcgtaagatgtataagtaatttttgctatagttatgttatggaatgatgtatctggaagtttatttccctccacacatactctgtgccactcctgtgctttatgggagtctattgttaaaaatctcactgcttcatccagtggtaacatgttttatggcccacaggtgagagtcccatttatcacagaaactttggagtatacataaaactaaaagagagaaaaagaccagccataatcacaacattcgaagtcagcatagctaatattttcatattttcctttctaatctttgcaaagtacattcatagttcaagagagttttgcttaggtgtcatctctcaataataaaaacttctcaaactatggatcaattatgcatatgtgcacctgtgggtacattatacatttatatatgattatatataagcaagtttatgtcctattagtctctgaacctttccatcacatcttaaatttttaaagtttttataaaaattctaatttacccttttaaatacatacctgctgtgtgacgggatgttagagaacccaactctgtatctattttaacagcatggtggcttatagcaagcatgggcaatcttttatgactttgcccccaatctctcccaatctcctgtaattcaggcatttcactttgctcaaccttatctctgatcagcctcctcacccattactcatcatttcacatcaggaatccacaagtaagcaattcaagaaccttgaatggaacatgagtgaaagctatttctgcagcctaaaccccttcaatcaatacaagaatgtcagcaattctagagtctaaacttattaaattctcatattatttttaaaatgctagccccagtcctctttgtctgatttctaatctctgaaagaaacagtaaatgcaaacataggtattttaaagagatagggtggaggggggtgcttttccagggtactctcttatcattttcctgacaaacttatgtgatttaacagttactggtaaaacctttcaccaacagtttgttactgtgacagcagaagcactcaaattcagggaatgtcgaacttcatcttgtgaattcagacctggcagaagaccatttcttcactagaagttggaaaaatgtcactctctgagactgcaataaatggagcccagggttctgctttgtgtactgagtgagagaataatagtgtggtgtccctgtagacagagaagctgactatgctctacggagacagtgttttccaagatgtgttaagtgcaattccagcttctcggcttttgatagatgttcctctagaaatgttcattgctcaaaggcatttaggaaaagattcattgcaggactttaatatgctaaggtgcaatatgaatcaataagcacaagttgtagcacacaacatttaaacctgtatgagcatgaaacccttcttcaagggagactagtgttttccaaggcctgctttgggaaattcttcattgggcactttgcttatgtagcagatttgaatcttagtctgtaaactcagatatgcaataaatagaacatttcacatttttgaaatattaaactctgattttgatgtccccatccctcccaggtggcaggaagcttaactttggcccttcttggagttctgcactgacctgttagtaccatgccaaaattctggtcattgcttatctgtcacacttggctagttgccccttgactcagacagggcccaggatccatcctaaggtcttccctcaggatgcttcctgggcaataattgagtctctactggtggggatggggtgtaatctttttttctgtttgccttcctgattctctctccctgtactccaaaagtcttcctgagtatacctagcattaggttttactgttttattttcttaattgatggctagtatttaagaacattatctcccttctgtattatgtattttaaataagagtatttactgtcttgtatatacttgtattgtcttgtatatacttgtcttgtaagagcatttactgtcttgtatatctgaatgggtcacatgtagtgcaagcttcaagactggtttgattcagcggttcaacagtgtcatcaaagtactcgtttcattcttccttaatgttttgtgactgtgatatgacattgaatctgagatctattcctttatgaaggggaaatagctagcatttccaggttttatatttgcaacccacatcttccagtagagagacacaatggctttggacaacttttcagaatgttaaacaatccttctctcgtaatagcttccatcaaacctctactaacatcttattgaccttcattgcatcacataagttaaaattattctgaaatattttatatatgtactatatatatatataacatttaagatatatgaagaaaaatataatgcgatttcatagcccccttttaaacttccttagcaatgcctcctatatcccctgacaggggcaacgtttctttgtgtttatcaatattttgctttcctgtataattttaccctttatgtatacaatcctaaacaatatattttttagtgttgcatgattttagattttgtgataatgatatcatctatgtgtatttcttctgccacttgcctttttgattccacatgatttgtgagattcatccatgctggtggatgaatctatttcttaatttgtactgtgatatagtattccattgtgtgattaagccacagtttacttatctatgtgttgttgataaactgttaagtcggctctagtttgggagtgttaggagtaatgttgccaatcttctcttatacattgttgtgcctgcatggaaggggtgcccaaatgtacatacatatataagaatggcattgccgaatgaaaccatgaacagtctttaatgttactatataatgcaaaattattttccaaaatagaataatattttcaatataagtagaatataagaactcctgtttttccacatctttgccaacacttggttttgtcagcatttaaaaaagttgtcaaattggtgtgtatgaatttatactttacagttcaatttaccattttggcaaatcaattaggctgagaatatttgcatttttaattgatatttttatttcatcttttgtgaaatgtctgtttatgatttttacccattttgattttgtgttgttttcaccttcttaatggatttgtagaagttcttgtatgttctgcttactaatccagggtcagttatacatgttgcaatatcttctcccaatttgcaatgtacattttcactttttgagataaattcttttaataaactaaaaaaataaggtggtcaaattatcaaactattccttatggttgatattttgttgtcttatttttaaaattattttctactccaacctcatatatatttgtgtatgcctatgtgtgtgtgtgtatttacatatgggcttatatatttgggcaatgtggtactgatatatttgggcagtgtggtactgacacaaagacagaccaatgagacacaatggaaagcccagaaatgaatccatgcatatatgtaaatttggtagatgacattacagataactgggaaaagataagtggaaacaattaatttctatattcaaaaaatagatggaataagaccccctccttcataacaggtcaattaaagacatatatgtatatgtttatgtgtatatatatatatatatatatatatatatatatatatatacacacacacatatgtttatgtgtatatatatatatatatatatacacacacacacacacacacacacatttctacatatgtagctgtatatacacgaatatacacatatatgtctttaacttaacgtgaaggaggagtcttatttcatctgtgttttaatatggctaataattgtctcagcatcatttacgtttcccaataatctgtaatggtatctctgtcatctaccaaatttccccatatgcctggatttatttctgggctgtctgtggtgtgcctttggtctgttgtctttgagtcagtaccatattgccactagcttctatacatttacaatgagctttaagtctggttacacaagtctcctcccacattctcacgcctagaccttattcttcaggaatgtcttggtcattcttggccttttgcatttctacagaaattttataataatcttggagatttttaatatttttatgaaatttcattaaatttatagttttggggaagagttggtatctttgtaacattataatgttgagtctttctatctatatttctatccaaatctacttatttagatcttcactgtctttcgtcactataataaatggtatctttcagtatcatgtattctcattattgctaggcattctttttttttttttttgagatggagtctcgctctgtcatcccaggctggagtgcagtggcgcgatctcggctcactgcaagctccgcctcccgggttcacgccattctcctgcctcagcctcccgagtagctgggactacaggggcccgccaccatgcccagctaattttttgtatttttagtagagacggggtttcaccgtgttagacaggatggtctcaatctcctgacctggtgatccgcccatctcggcctcccaaagtactgggattataggctgctaggcattcttttttttaatggatttcagtgtttaaagaattcaagaagagcctttgatatctggttacctctactttttgaggaaaccaaatccctgatgcagagaatgaaagagtttgtctatctgcttgaacggagaagaaaagaaaaataaacagaaaatgttgcaatttgaaagtaattttagtaaatttgcctgccacacctacataatcttatttaatcctcaccacaacgttcgaagttaggtgttatttgtcctattttcatgacaagggaaaccaaggtttaggaaagccaagtaatttactcaaagtcacagagcgaatgtgtttatggtaaagccaggatttaaaatcaggtggatttcacaccaaaatagttctgttcatcgcgtagtactttccctcgggcaagaagaatgttcacaattttctaagcatttgagtacaatgaccggaatggataatcctttctgtagacaattatgtggctctgtctcccctcactaaggtcagcagacatttgatacaactttatccatctcttcttgtcactgttgctggctgagggggccacttggctcccagggaggagattttgcacacctgaggaaacagacagcagacagcaccaacatgcttcccctagactgcatttggacacacacagccaggcaggggaactgaaattgtagagcagcagtctgtgtggagtcattttaatgttttcttaaacagtcagtgatggaaaactttgataacaactcaagtgaaagcttatggctgcgaaaagcctcctctgtggatctgactggaaaggattctctgctgaatatggcttagatgcctgagccccgtgttctttggtaagaaaattaccgcaagtcattcgccatctgtgatcctcaggggtggaatcttttgctggaagacacagttattatcaatcaacctgtgctagccaacaggcctccagagcttcgcgggtggggggaatgttgttacagaagaaacgggaaagaggagcctttgtgggaaagggtggttagtattcttgatggcttgtcagaggcagtagtggccataatcacgtgagtgcagcacttgagctggttcagagctgcagtgcctggagtcgtgtctgccggcagctgccggaggcggaagtggcgtccatggtagccacttcgtcaggagggctcctcaggttttagagccagagcacaactgtgactcctataccaggcacactggacctcaggagccttgctggagtctcctcagaattcacaaaagaaatatgaagaattaggaagaaagttaaaacttagtagagatcctctttatagatgcaacttgagaaacagcgcacagatataggttactcgactggaggagttctgtgtttgtgttttcctattataaagagttcgggagaaagtggggtgcttgctaaccattggttctctctcctgtctctctcctgtcttttctctcatcttgccctttctcttttgccattgccccttttctcatttttcgttctcttatttgttctttccttctccctccacttctccttcgccttttctctcttgcttctttctctgcttcacttcattctccctgttctgtcctctcttccagtcgcccttttttccaacccaccctttgctatgttctgaattagtgattgcctaagtggaaagatggagacagtttcagaaatcctatttattttagttcatcagttgttactgcttactttttgtttgaatatatttggggtatattctcaaaaatatgttgataatggagtacagaaattctggtgactgttactctccaatgtctctcttttcttcctagaactaactactagtcctttccagttcgggtagatggattatatttcttgcatagtactttcagcatttatcatttttggtaaatgaatacctaatgtgccgctagggaagctaaattcatacctatttcagctggggtgagcactgtgaccttctgttacacatacctattgctgccaccagagacagaagattgagttggatgcactatgggtagagacaagggctggtgctacttacttatcagaaaggattcttgtaagaattaaatgaaataatgggcatagaatttagaattaaataatgttatgtgcatggtatgctacaaagatttggattcagacctctttacaaatctcagattcgtcatttactagcatgcaaacttgggcaagtcactttattctacttgaaccttttcttttctataaaatgaggtcaataaataatattcatttacaaattgatcatcaaggcaaatgagataatacatgaaatctcctaaaatagagtagatgctcactgaatatcaccttacttccctccacccaactatgcatttatttatctgtcaaacatttatattatgctcactttatgccatgcactgttctaagagctttataaatttaactcttcaatatcatcatagtcttttgagtacttactattactatctcgttttgcagattggtaagctgaagcaaaggaggtttaataacttgtttaaagcctcatggatagtaagtagcagagccactaactgatatttttgtgccgacaccttaattcaagcttttttctcctttaactgaagatattattgccctgagatattaccttgaaatcgatatagatttttttcttgagtttgcaaattttctctcttagaaggcctgaggaaaaaataacattaaacaaatgcacacttaattatgagttcattttctgtgttaatgtagtaaagaggtgaatgaatgtcataaaatatactctcatttggttccaccctgagagagccgttggattgcagccccagtgcttttcagcagggaagctggccagagatgcctgcagcctgctggggagtgtgtgggtagctcctccagcagtgtgcctgcactcctcatctgcacagagcatgcacagtgttcaaaggcacacagatggggactcaagtggggccaagatcactgggaagagtgtcggaaaatgaaacctggccaacagacagcacccttctgtttaatcagaatgctggagccaggtccagagaataatgactacaaactggctgtgccttgggcctattcagcatcttgttctcattttcaagtgtttggtccttgggaaggtctcaaagttcactttgctactcgattatgctgcctattgaggaattttcaaggcaaagtgaattcatgtgacctggattcattattatttaagattattaacacatttttagaccgaattggcagtaaggaaagggaggaaggaaacatctattgaggtcataccaggtgctgggtgctgtagtgggcacttctatgcatgttagctcaactgacgataccagagaagtggaaattacttcagattgtcatgaaaaagacaaatggagaaggtgggatgcatgaaaaatagacttttaaaattcctaaatcaatgccctcaagtcatctaaaatgattagaaacagtctatagttgtcttttatgaggagacaagaattatatgtgttccttgtttttttctccttctgcttgctgaagagttctggtttcacttgtctagtccttttccttccctttgtcctgccttgagagactggttatattaagcttttgtgaggaatttcaggtgagagggaatggaggaagaaaaaagagacttagggacacatattcatacccatgtgtgtatgtgtatttatgtgatatatgtataattttatatatgtgataaatacatacacattacaaatgcaattatactatacttaatctttcatatgttttaaatccttcaagtttattatgaacatctccccatgtcaacacatttaaaaccacagtatcattattaatattgcctaaaactctatactcagtatatgtcaatacttgattattggatatttaggtagtttccagttttagttttatcaatagtgcagcagtgacatctgaacaaagtcatttaaaatggcaccagttactgtttctcagggatcagctttattgtgatttttcttaaattagaggaatcgcctatatgttcaaactaattttttagattactagaaatattcttgtaacaatgtcttatggagaacccactgtataaaacccatagaagtgtacttccccagccagatgcagtggctcacacttgtaatcccagcactttgggaggccaaggcaggtggatcacttgaggtcaggagttccagaccagcctggccaacatggtgacatcccatctctactaaaaaaaaaaaaaaattcaaaaattagttgggcctggtggcacacacctgtaatcccagctacttgggaggctgaggcagaagaattgcttgagcccgggaggtggaggttgcagtaagctgagatcaagatcacgccactgcactccagcctgggcgacagagctagactgcctcaaaaagaaaaaaaaaagtggtactttcctccatgggttgcctcctgcccctgaacgcccccatccctcagtgacctctgagcttccacagtacccaagagtgctccggaacaatggtaagaccactgagctaggaactagctttgttttgtttgtttgtttgtttctatattattatttgttgatgttacagagtatagaaaattggctttttttctttaaaagaagaaactatgttttctttttttaaaacaactcacattgagctttgctatactactttgttacctgaattggtaatggttttctttttttctatgttataatagaatctttatatttaaataaacttaaatactttcaggcgctgtggtctagagctcactgaaagtgttatgtgtacatgagcaggaccctcaagagccaacctgtgttttttgtctcattaacttggaggaaggcatgaggggtcagggcctacaatatcacttggaaacaaggaatataaagaaaatctggcctgtttggtaaaactgtgcttctccatgtcttgcctcttttgatctcttgcctaagttttgttttgaaaggttaacactattcatcttgtcatgactttaaataatcagattacttttctatgcaacaatgctctgtttttcctaagtttcctatttcttcagtgattctggggtgggatggagagtgaatagaaatacaggcatcaactttagtgttttcattgcaattgttttatttgtgcccctcaagttgaacctctctgaatgagtgtgatcatatatctcacatacttggtgttttttcttcagatgttgggattcaaattgtttggaaatttcacatgttgtaaacctaacttagtgacatcatgtgaccatgtataagggaacctttatcattatgttattaggaacctgatctctttgtcattcatctattttttgccctggcttgttgggattggatcaaaccaatggaaatgccggagaactgagttagaaatgcataggatgttaaaagaacagaaatttatgctttaaagtattactactattagatttgtaagtttaattttttttcctctggtgttaaataaattgctcaaagatctctgacaccagaaggaaattagaaggtaaatgtatgttgataacacagaaggatcagagagggaaatccactagcaaataaaagaaaataggaagagtaagtaagtacatcattgtaagcaaaaactgacaaaaaggaaagtttgaagccagaaacagtcaaaaagttcttctaaaagtaagaaaatgtttatgaggggcacattggacatattttctattctattggggtctggagagataggcaagtatgaatgaacaggtggaatttagttgttttccaaaacttgaacaaacaagaaagggtattttggggtccaattagcaacattaagataaattttatatactggcttcctgggatttgtgccttcaatttacaagttttgctgataaagaagaaaatcaattttattttattctatttcccagggagatagcaaaatgcttgaggattttttttgcaagagactttttaattaggactattatagaaatgagttaaacagccaaatatcaaacctgaaacgatctcctgaggcaagagtgtacatgatcattaggtttggaggcaaactattgttaaggattctcatataaggtatcttagtctccacaagcaaaggtgatcaaatccagttgaacttgcttcacaccatatgccattgtccttcagtcccccaagcagacaaatcaagcttgattacatatgagataccaaggcatccagagaaatgatagtgggtgtaagtcatgccacaatagggtgtggataggtgtttctggatacggagatagatggccacacaatcctgctgccttcacccagccagctctcagcttaagagaggtaggaaatgaggcaaggaaaggaagatctgagcccttcctggagctcagctgcatcctgaggcagatgtttaatggactagaaatgatcacatagagaattccttgtgtctaacctagaactaaagcctgtgagaacacactcttaatttatttccatactgaagccctaaccagaagcttagatctttgcattccaacataagaaagagacaggggttaccaaactaatctgtgagaagtaaaagaatgtgtgaaaaaaataacatgagccccagagtctagagcagaagtggataagatgaccttacctatagtcttctaagctgagacaacaggaggccaggcccctggtcgggaggatggtgtgtgtgtgtgtgtgtgtgtgtgtacatgtgtgtgtaatgtgacttacccattaggcaccataggtgcggtgccttggggccgtggcagttttagggctccacaaaaatgttttaatcttttttaaaatcaagaataaaaaatgaatctaataaaaataatgaatatttattaatgaattcagcatagattatataaacttgccttatgccaatgtagtcctaaaatatgttttcatatttttttctatagaggaaggtactcatgagggcagaagtgactagggccaaaaaagtcattgtgcagctctgacagattgaatgaccatgagagagacacagaatgacaacctcctgatagatagatgcagagagattggcagagaggaacagagacagaacagcgagaaacagatacaggaagatacatgcagagtgagaaacagggacagagagacagagggagatgaaaacagacacacatgcccacacacaaagagagaaacaggcagacacacacccccgcgccccctcccccatctggacccgccccaccaacatcctgacagatacaggaaggcagagagaatgagacagatggagacacaggaaagacatgcagaactagactgacagccataggctaagatgtcacagggaacattctactggaaggaggcagccatcagcttggtcttacttgtttcagcctcccaggatcaaatatgtctgaagagtaacaggcctttccatccactctttatttttagccacagaggaaacagtaagagagaagagggcagatgcttctgtttaccaggattttaattggctacctttggagcctgtgggcctaagctatgactattgtctagaagctttgggagaaaggtaaaaccacagtgtaaaatcacagtggaagcttggagctgaaatgattattgtatcttctctaaccttatacccagtaatgatgtgtttgtaaggccagtggtccaattttttctgcagagtgaacaaaccagtggctcccccactacctccatagagatgttttaacacagacacattctaaacagcaaactacatcggacgccagtctcctataaatgctagagagtaggcctcctcctggcctttatttttccatgttcctggatatatgagagtctcaagagggaggtttgatgccaacccctgcccttgaccttgggcaaccttcttcccctttgtgggtggaatgaggtgccatgacttgttgcttttattcacaaagtgcctcacttgtttatatgaagccaccggcctcatggccatgcctcagccaaaccaactgggaattatgaagattggtttgaggcaggaagtgtcctggctctagacctaggacagctgctttgattgtgagtgcaccaggaaagtgggacaattgaagcatgaggaccttgtcatttaattgaaagtcacagagttccttttcacctgtgtcatctctggaaaactggagagagatgatctatacaagacccagtaagatacacaccatttaaaatgccctacaagaagtcacagtgaaatgaaataatttacaccaaaaggtgtatgttcttcaatcttctctgaattctggacttctgatcttgccagagatagttgttagaagaaattgatgataacttttttaaaaagaaacaagttttaaaactagaactagctcagccttcccttcattcaaggttggataagcagtagtcagtgagaacttgggaaaatagtcttgaagaggaactgtgttcacatgtccttagtcatgaaaatcatttttaggtgaagtgatttctcattttgcacaaatgattatagagtgtgtctgtttgtgaacttggtcataattgctgcccaacatcattatggcgataatttgtttagctaagagaataagagcagttgaagttatttttaagtttgcattttgtcagttgtaggttttcttttttcttcctttttttttttttttttgcatttgatggcaccagctgagtgtgggatggtgcacaaatcccctcagaaatggagttatttggtcacagtaaactgaagcctctccccaaccgccaagataacagcaattactttggattcattttagtaggtgtgaaaagctcatctgtttaaaagatgagtactctggtttatataggatcctctggtagcagcaggttaattaaagaatgattctatcatccctagcctaaatcgcaggcattataaaagccagcctgctttatgactgtcatgtgagaaatgtgcacactgataccccagaatttgagcattgttaaaagttagtccattgggtgtgtttgttcttcacattatccagagcatctgccagtttcttctttcttgattatatgcacctttgcaaacaatagtacagttagcaacactcttctaagtgtgccacatttaatttggggtgagaatacagctttaattccattttacagatgaagaaatggaggcacaaagttgttaagtacctttgtccaaggtcctagagtttgtgagcagcagaaggggtttagcaatcagcctgccttgggagccatgtgcttattacctacaattcactgcccaactgagaagtagcatgggagatcacctctcccactcatctttgagatgctgattcattatttgactaagaggccagactcttctgcttaccaggattttaattggctacctttggagcctgtgggcctaaggtatgactgttgtctagaagctttgggagaaaggtgaaatcactgtaaaatcacagcggaagcttggtgctgaaatgattattgtatcttctccaaccttatacccagtaacgatgtgtttgtaagtccaattttgtgtttgtggtccaattttttcctgcagagtgaaaaaaataatggctcccccaccaccttgatatggatgttttaacactacacattctagacagcaaactacatcagagaccagtctcctcatccctggaggcatcacactgtgtgctgggctctggacaaagtaactagaagtataagttctaagcagtcctcaccactaagtaacttgtggtataagagagggaatggcacacataattgtcaagtcaacccttactgcaaagaagttcagatgggtggtgcaagcagtaactgctgtggaagctcagatgaggaagaaaacaggtctggctgaatggtatgggtctccaagaagagggcaggatgtgtgcttgtctgagtttggggataagattcaattttattctaaaaaaaattgcacttggatgaatagagagaagaacatgccatgtgcagagatgtgagcaggactctgtgaatgtaaaacacaggtgatggtcagagtcagatgggagagctctattttgggagtcctggatgagaggctgaaaagatacccaccgacccatgctctattatagcgagcagaaaaatgaacacattgtggtttgctcatttcatatatgaaagtgtggggctcaaaaatctgattactgtgtatgtcacgtagaaccacacttccccctccaaagtacgtctcatgccattgtatattcacatcttgtctaagaagaaactgtatctctaagtgccataaactccaataaaagcaggtttgttctttcctcccacttgtgttcctgaaacctatgtttataggaccttatgttacttacactttggtgtgttacctttaatctcaacctctatttgctacaaacaccactgaaaggtgacagtttcatgtgggataaactctattgatctctgtctgtaaggcaagatgtttttctcaagcatttttgggcacattttctctgagaggtagcatagggcagtggtcatgagcatagatggaagtcagactgtctgggttctgatcccagccctggcacttattgctaggcaacctatggtatgtacttaacttctctgtgcttccgattactcatgtttttaaagattaaattcaggcaccatgctttaagaagcacctggcacatagtatggaatagttagcttacatcatgggttcccagcaggggtgatagcaccctcaagggggcaaaaagtttaaattcaggaatggtttcattaggaaaacatttgcttagtgaggcttcttgtggggctgaggggtaagagggatgagtggagaggaaaaaagtggtccagaaacccctgggttgcaccaaccccattaagttggacctgatgaagcattgatagaaggaatcccaaaagaggtttacatgttgtacttggaggcccgtaaccaatagagggtttaatcaacaggctttttacctagggcctgatgtaggctccgccttaaggccatcacattcactgcttggttatgtgcacagggagggaaccagtggaagcccaaccccccttccacagggttcttgaagctagtcatgaagggaacagagggaggagggaatgagttgctttgcctgccttgcctgaggtggaaatggctgtgatagatgtggtgtgacctgggcagagtgaatagtaaaagttcacatctacccaggattttctgtttttcagagtagtttcacactcattatctcacaagcactctttctcttttgaaatagtttttagttacacatgtagtaaagaaatgcattcctttgtaagaaattgaagtattactgataaaagtaaaaatgccccatgagccacatctggttccagttccctgctccctccacaggattaacccctgttagcactgtgtgtgtccagcacttgtttctattcatttatgctcaggtaagactattttaaaaagtacactattgctgtgtagatcctttaacactaaggatatcaaactatatgtaattttctacttcaagctttttttaaaatcataatatgtcttggagatggttccataataaaacattcagatctacctcactcctttcaatgactgcatgcccatggaatgaatacctcattatttatttagccatcttactttctggtaaatactgatattgtttctgttttgatttttttaaccacagctacgaatgccacctctttgggtatgtgggtacgtgtctacagctgctcattgaggcagatattatctttacagcaaaggagactgaggctcagagaggtgacacaggcagtgaatagcatgtccaggaccagaagccaggtcttttttgttttaaatccaggtttgatggattttcttccctcattccacagctacctcccacccttatctcatactgggacatttgcatttggcaactgatttcctagcagtaacatccctggggtggccctacatgtcgctgctccttttctcactgtagatgatggatcagctgctgtgtgtccctgaaggaaggcagctttcaggaggtggacagctgtgtgtgaataaaacaggggaggaggggatccacacatacctgtcctgacctatttaccgagcgagctgttgagccaaagcagcaccgtgttatctaaccacagctaaaatttgaaaggtccaactgagaaatgtcaggaggaagtaacacttgaattattaaggaagtaggtactaaaggagatggagaagaataacctatgaaaccggcttgttttgagcaggaaaggaggagatggatgttctaagtgaccgccataacttgaaaataaagtggttcctggggcctactaaatgtttaaatttcagagaatccaagcttctttttgatgagccttcttcagtattttacaacggcatatcgaaagggtttcttaattaaaatccccagcacgttggaggggcgggctgattgaggctgcagtgcctgcaggcagggtgcccacctccatcagccacgccagccgaaggggcatcctgcagctcctctgtcagagggattcctgccggagcacctcctggcagagagcatgaggcccggccaattcaatgtggcctcgctgccccagcccagccgggacactccccaggacccaattagcagattggaaatcgcatccaagtatgttacaatcaccaagttaaagaggaataacagacatgaaagaatcaagtgggaaaagaacattttggatcccgaaagagcaggctgcttgtcggagttctaacgaaccgaaacaaaataagtagtagctccttaagcctcttttctaacactgctgggattggttagtgtagagaaaagcattgaaattgcaaaagaaaaaaatgcttattgttcctatgttcaatttgttatttaatataacttgttttttaggaatttaataaaaaaaaagggagggcatcattaattttacattctgcaagaaaatgaaaaatgatctgctgattagtgatgtgcaatttgttccttgaacatctccagtaatgtgtgaatgtcacattacataacacttataatgattaaaccagaagatgaaataagataggatagatcttgtgttctttccttgactggtggacaactcatctcattaatctctctttggcttgcagccttaaattgaataagccgtgttactgggggagatttatggccaaaagacttagcagcctcactgaggaaatcttatagcaccattttgagagctctccaagataattcttgggatttgtattaattgtagcttgtcataaaacattgcccaaaccagaaatgagcaatgaaccttctcaggaacttaatattacagcaacattgaaaatatgcacttcttgatgttccatctcatgagatgttaaaacattctgagtcccaatttaaaattattatattagaaatggtagcttcagtagagtgggaaatgatagcttcagtagagtgggaaatgatacactgatacacctgggcactgaggaatgtttgtagaaaaccagtgggctttcaatatcacaagggcagtccttcgcagagcagtgagcaggatgtccctatgaaatgtttgtagaaagaatgaaccaactggtaaccatgagtcctctttttaaaatataagttctctttgtggttgaatttctgacacttggtgtataagtaccagtaagtaagattggcttacttgttgcaatttttaaaggaagtgccttgccacagccagaaccagtggcctggaactaaagttgaaaagaggttagatttaataagtcatccaatatatacaagatttccctttagcagtcatcagtaagccttgcttgatgacttattccatttggggtgttcacttcctctcaccgtagcatgtttattactggactctgggctccttgaatgcgattctgtgcccttttctgtagccccacatgtcagttatgcacaggacacactaaatgctcaacaaacactttctgatatataaaaccaaaattattgtttatatgaagtcaaaatctacctccttgaacttccatttggtggacctagttctatcttctgcacaaaaataaacatgtcaactccctcttccctgtgagtattttgaggcttaatcactcctcaagtcttctctgtgccagattaatccctagttccctaaattaattattttcttaagctgccatgtcaatcattttgtgcttcctggtcaactaaaacctcaggtttttcttaagtaatataaaggaaacatttcccctcatcttttattggagtcatgttttccttttaatctttttaactgaatcctacttaccattttcaattttaatgatactgcttaaccaatctttctaccttactgagagtttttcaaatgctgattttgccaataatgctgttaccatggtgttgtatcttttgcagatttgatcaacagtactggcatcagaaaaacacagatgctttggtaggtgtcatcagggtcctcatctctccctatgctggcattgatctatcaccttatgtgatctttagccccatacaaattctcatatggcattagaagtaactttagaaaatattaaatccatttgtcctctctattgatactatacatgaggaaactgagtcccaaagagcccatggccacattactggttaatagaaacactcatattagaactaaggtccaagtgacaccaaaggcaggtgtcctttcctgtttatcatagctgccagtctttatattattcacaaggtcaatgcaagaaacatttaaacatctcgttggaatcccaacatattgtgataggtttcctattacgtgagggttatgtaccactgtcaattagaagataaagcaaagtggtggccttttttatctcttattctaagatcttcagtaaaattccttctgtttctaaatataaagctttaaaacaggctatattgatgttgcgaaagaactggtacattataagtagaagtgtgtgtgtatgtgtgtgagggaggggtatacacatatgcacgtgctttatatcataattaaagagtggaagaaacaggattctttactggtcaatgaaaacttttcagaggaaggcaaactggtcatttatacaaaaccgtttgtggagcatgtagacttcctttgcactcactaagaaagcactctttttaacgagggactatacatttgttcaatgaaaagaaaatagctctttgtaccttgctaacggaattgctaactattcttcagataggagtctcattgttcccactattcagtatttaaatacacataatgtcatgtctttactgccattagtcagtattttcaaagagctctttttattaaatttctgaaacccaggaccaaagaacactttctcttaggtatatattatttgttagaatggaaacaatcaatacattttcagagtcaaaaagcactgggaaacagtttcttttttggtctgagcatattttttattaaaaaaaaaacctttgaaatattttgttttatcagaattgtttgtagggaaaatgtaaacctcactattgtttaactgcagtccaaagaggactatcatattgcacttctaatcaaaaaataaattgaacatagtggtaggcttacagaaagagagagaattagatttgattagattagctttaacctgcccggaataaaactgtctgcctttcctgttatttgtcagtgtttatagcgggtttcatctacaatgctttcactattatttctgggcggtaaaaggcagtcaagcagaaaagacactcataaatgtcagaaaagagtaagtttttttttgcatttcaagggctttgaaggtcaagttcaacccacttaacggaagcagagtgatgggtatgtggtagcatgttgttagctgctgcgtttaggcatataatttatgtgaagttaatgcacttgtccatcactctaagaaagcaaaaggtcctgggaagattctatttattttattcattttgttcaacttttagaaggtaaaataattcaaatttccataatttgtgatggaaaagtcacatgtttaacttgttaacagctgagcagggtagagcactgtaatacttccctgactcttcctgttgtaatttgtttcttcttctgagcagctgccccactccatgctgggcaaaggaagagctctgttaagcatttttgcaaaccagtgggcattttttttttcctctggaagcctttattgagatgttttctttttctttttctctatgaggctttattttttcccaccagggagcctgagcaattatagtttaaagctaccgaagataggtatgttctttgatatcaaagagcttcttgaagatttttcaaactaaagagacccaaaggttgtattttaaggtgttactagcatggccctttgtagttgaaaactctcagaatgtctaccaagtgtattatgctttgtttggaaatgttggacctcggtactattgcatttggtaaaaggcagggtgttagaatctgtgtgtatgtgtgttcctactgctgctcagtggagtctctgtagttgcaaattgtttccctagtgatgtaggatgactagagagagaatagggagtaaggaataaaatcgacatttattgagcactcactatgtgctagaggcataatgtatgtaggggatagaaaatcttatctctattcttttggttttgttcccaccttgaattgaattgacatagacagatcaatgggagaaaaatgtatttaatacaaattttaggtggcacaggatccttcatgaggaaatgaagacccaaagacacagttattgttgaagacttacatactgaactggaaaaggaatagtgagctgtgaaaaagaaaataattatgtggagagactagaagataagacttattttaacaaggttagtacagaattttcttagtctcagcttcctgtccgtgatgataagaatgttgctttctttctactatagggagggatctttcacatgaaatccataggggaatttcacctcctgcttttgggaaacagatggagggtcggagtgatcttgcacctcctattttttaagtgcttttagctcaaaataattatgccaaagtagcatatgtgggggtggtgtgttctgaacgtttttatgcatcttatttctttcaatcctcatttactctgagaaatggcaggttactatcctcatgttcctgattagagaatcagaaagggaaagtttacttgcctttgagtcaaaactggtttctttaacatccatggttgcctcactagaatagtctccagaggggaggaagtggaggaaaaagaatgaaaactaggaaagcaaagcaaacttcttgggaagtgtgtgtgtctgtgtgaaaatacatttttgtgcaatgaaatggtttgagtactgtagctctgagttctttcgtagctttgagaacttttaccactaaatggtagaaattcagttgttctcttttctttctaaggaaatgtctttgggtcaccccattgaggtgctaacttgctgcctctttcctggacttcttttctcccatcgacccttctcttcttctattcgtcaattctcaatctgcaaattcctgttgcctttcatatgtagaaaattcaattctctctttgtttttactgtccatttccagaccatgctttatcttagaaaccccaaatgtccatagcagtgttttactaaacgatgaaccatgaatgtgtatttaaccaatgagtgttgagtgccacctgtatatcagatattatactgggatgacatagtggcaaccaaaacagacacagttccagcccttgtagaatttcaactctgatgagaaagaaaggcattgtgttattttataataaatatattctagtttttcccctttatactttctgctgccatcaactttattattttgggagaaaagattaaatttcaaccctatatcttgtatggtgcagttgccccataaatgtgtgttgattggtgaaaaacatcaaatctctttagccctcatattttcttgtcacaaaagtattactaatattttgtattaaatggtcattgaagaaaatcatcatgtgtagttgagcatcagcattggtcagcatctgtatagaacttgaaagcctataaagggaggacttttatggactttatcagaagcaagcttcataaatctgtggagaaggggctcttctctccattttgcagttgagaaatcagtagataggaactaatttgtccaaggtggagatgagaatctcatctctcctgtctctaaatcatcttttcttttgactatattgtctcttgacaataatttaaaagtatctcaatatccacagcaataattattttttgcctgaaaattacaggagcagattatttcattcatttaatgtattgattcaccaacatctcttgcacatctaatatgtgccaaataataagtttccagagccaggggtatgttgtccttttccttaaggcattgtattctaacttattggggtagacagaaatatgactaaataaatacaggatccttatttaggatatagaaggacacatgacataagtatagaataagatatccttgtggtataatggaaagatcattagctttttaggtgcgcctggtttgaatcttgacatcaccagttactagctgttaatttgagcaaatcattcatctttttaatgaacagttgtctcaactatgaagtgggggataaaggtatttacatacattgtagttgtaaagatcagaggtgatatgtgtacgagacctagcatgatttcagaaacatagtagatgctcaattaatggtactgcaattttatcatgtctattatacagatatataatttgtactgtatctgtttgttttttacctacatatctaaattttcttctctatctatctgtctattcctcaagaatcaagagactaacttcccgaagagacagaagaacagctaggagaagtatcagagaagtaaagtttctagggttgtacaaaaacttaagttttgtacagaaaaaaaaactatactaatatatgtggcaattgaaaagtatggaatttatcaagaaccacaaaaagcttaccatggttaaagtatagggtacaagtttgggaggctgagagatgaggctggaggaacagtcagaggtcagattatgaaggggcttttataacatgttaagacacttggactttatcttgccatatagacaactccctctcacctaagtaggaaatgacaagctggcaattaaagtgcttcaaataacgtatcttagtatgtggaatccttaattgtgtagaaagaggagaaaatctatctaaaaacttacccaagaaaccaacacatggtatatactgaacaagaatccttacgattgatgggcaaaggagaggtgagatttctagtgaaatataaaattagaaagtatcataaaccaaatcccagaagcagcatgcagggctgaaatgttataggccaaagcaccctcgggcaaattttgtccattacatggtaagttctaaagcagcagggacaaggctcagagtaactaaacccggatggaacacctgcagtttttccctgaacgtcagcataaatatttgacatgtcttcctttctgtgaaggggccctgtcccagtgggagtggtgtctggtatcccttagcagaagtatttgttttcttaagcttttctttatgtcctagaggtggattctaaaagtccctaacgtattttgattttgaattttcacaaaagtatttttttctttcacagtaattcagtataaaaggcaataaaagtgatgtatccagaaatattcaggacctgctatcagcaccacatgggaataaactatcttgccacttgcacatcccatgggaaaaaagaatcacaatccacatataggaaatattgcatgtgtttgcctccgttttgcttgtattgtctgctctgctgaaaggcagattttttgcagataaaagctgccctgcgttggtgaactgctcacctattttactcaggaagaaaaggctttgtgaaaatcaggagcaaagcctgatttgcagaataccatctaaaaataaaatgcataaaaatgtcaaaatatgctaagaatacagggccaccttcatgctttgaaaaattacctagcaaattcagcaaatgctgtttttaagtgaatgtaaattatgtgttttcgaagtttcatcttgtgaattggtggctaggtgctgaaggagacatgagggtgtggaggcggcctttctcttcttgctgcactagggcaatagatctgtggttaaagcagatgaactgggaagctcttgatcaggcatacgaaatacccagattcttgtatattttctagtttgtgtgcacaaggcttctggcttggctgcttttgccagtggggaagcattagtgaacaaaacagatacagcttccagttttcaagagctcacagtctagcaagtcactgcaactttaaaaaggggatgtacatgtgtggtttaaagtatggtgggtaaagcctttaggggttgtaaaagttcagtcactggggcctaattctgcaaaagagaaattcttcccaaagctgggatacattgagtgtcttgggcaccagagcagaagttttagttaaaatattaagatccagcacaaagttacctcccaccagttgaatctgtttttgaaatttggaaaaatggcctctgtttctccacaactatgtattggtaattcttccctggggactaacttcatatatatattttcacaataatgcatactgaataaatctgaatattttgcttatggaatcaacaaataatctccagagaaagtttcattatgcagtcatatataagatatgaaacagattttttccctttattttaagaaatatgcatagcataaaaattctcaggctctctttgctttatgtagcaccatttctgataagataccaggtttcaacaaactggctcagtggacatttaaaattcccattgtgagtgccagggcttagtggaagatgtttgaccatgtgcgctaacctatcagtgttcatctacatattgggagactgaacctgatctattctgcacaactggacagaaaaatatggaggtgggttctcagccaagggttaaaaaaggaagtaatctcttttgctgtaaactttttctcagcaggtgtaaaatagctgcaatcaggtaggctttggtaagtggcagctgctatctgcccaattgaaagatcagaaattctcaccctatttctgtttcaattatgtagacagtggctccaattttcaagtgtctaaaggcatgcctaactctgtgataagaaatggatgtgggccagagtgggagccatgtgcaaagctgtgctgcaaaccctttttctagtgataccagctctagacaatcaaggtccctcggttatcattatagagtcattaaactcaggagccagcagtgatcactaaaaaatggatgtacagatgaggaaactgaggcctagagaggttaataatctgacttgtggtcagacagcttgtagacttatctagatatagcctctgtccttaagctgctgcctaaggacagctaagtgctaagtttattgctaagtggtaaactgattagtatcacaaccacctgcaacattatgttgagaggattctgaagttgcatcctgattcaggtggaaatagtgctatgattgattagcaatgtctgcctggggagaaggtgggatatggtttgctgtgtatttgctgaatttggttgaatgatgatggctgctttgtaatcacgattgctacaggatgtgaagtgtgcttcagtcagaacaaagcgctctgaatcttcttggaggggcaggacggtttcacagaggagacaacatttgaatttgatcttgaaggacaagtagaagttttcctgagagagaaagaggaaggaaaggaaagaagacattgcatgaggaaagaatagcttatgtaggcaacctgatatgtggataaaaaaaggaaattgatgatcattgattgtctgctatgtaatgggcactaagctaggccttttctgtgttatctaagtatttaattttcataatgaccctttggttttacagatgaggaatcagagaaaaagaaaattaagatgtctgaggtcattcagctattaagtagagctaagattttaattcttggggcttcaaagtaactttagtggcagcaactcagaggaacagtataggtaaggaagagtggatcagagaggcagagatcattagtttggatttggactattgaacttgagttgcttctgggacatccagattgggatggctaatactgttggaaatctggcacagagtgatctggtgatggtttaaaaaaaaaatcaaaggctctttgataacagaccttgtgcattttacatctaggttcctgcctaatagtggagatgtttctgcctttgctattctagcaggggaaactatacgtaataaatgcatatgctttatattgttttagtgattcaaatgactgtcaatgcaatattaaattcagaattgataggaaaactgtcctacttagaaattcaagagttcttggcacaatactatttattatcaccatgagacctgtgctgtagcaaaactctgcttgtgtttcggtgaaagactgtttaacatgcatgtttcactctaccgaggttcaactttgacctataagaggacagtgtatattccttagagagatgctaggaggtaccacaattgatatctatgtatgagaagtgggtgggatatgcctgcatgagcaacataatctaaaccaagttcaaaaaaagaagttttttttttttccacaggtgcaatcttgacaagaagaaaaatctcaaaaaggtattttgcattggtaaattctgatgtcttgggcagctccaggactgtttgtcatgctttccttatggacttctggttatgcctccttaaggatgtgggctgagggataatcatttaaaatagtccaggcaccatttctgattctttgttccctagaatgatgatggtggtggtggtggtgaccacaacggtgacaacaatgataccaccatatttcattgatttttaaaatgtttttccacattttcagctatctaagaatacttatactcagtacttccttgcagtcactgtcagcctgcaacaaagttaaatttgtccacagaggattggcattatttcacatggtcacctggggtcactaccaacctgagaccatttaaagttatttgctgaggtgttttgtttgtttgttttcgcactgtcagtatgaacttgtatcagaaacctgcatgagtatctgcttgtggttcaagttctcagggaagattatttttcctctttctcttcttgctgtgcctttctgaatggaagctttctttctggcatattctagtgctaagggaatagctgtttggtgtttcagctttttgcagaggtctcttattagactcccatcttacttttctttcttattctatttagagtaacagtgtgactaacaatcgatggtctcttatagctgatgaactactgtaacaataaaagctaacatttacttagcactttccttttaccaggcagtgctctaagggctttttatatgcgataactcatttaaaccttcaataattatattagatgggtactcttattttccccaattttaggtaagaaaacgtatgctgtgtgcccagggttgcacatattgactcacttagtgttaccagtggagggtgtccaggttctgggcgttttgaacaaagaattgcacaaaacacacaaacaaagcaaggaaagaatgaagcaacaaaagcagagacttattgaaaacgaaagtacactccacagggtgggagtggccagagcataaggggctcaagggcctggatgcagaatcttctcaggtccaaataccccctagaggtttcccattagcctgatgtaaatgaagtggtgttcacctcatgtaaatgaagtggtggtctgcaaccagtccgattggttgcagaaagcaaccaatcagaggctgagttacaaaggtcacagtcctatgcaagttttctgcaaccaatcagaggctaaagtgatgttacaaagttacatttctatgcaaacgaagacttggcccacaatcagtctgattggttgcagacagcagttaatcagaggctgaagtgaagtttcataggtcacactcccatgcaagcatctgattggttgcaaaaagcaaccaatcagagatactttccattttcaatctgccacctagaaaaagtggggttttgcaaagggagtggtctctggtccttttgttacctagccagtggaaagttagggtttttctttcaatttagtcctaggaagtcagcgtgaaacggccttaggttccctgcctccagaccctattctcttgcctcattagtgtaacttgaccacctgagtctaccggtacacccctggtgagaatccacttttagctttgtaaagtacttggcataatgcctgatacttgctgagtacatagtgagctgttgcaagtcccttccactaaaaaataagctattgtccttatcagaagaataggatactcttttgttatctatttctcattccatgatataggattctagctttaagtgttgtcaatctcagacaagagttgattatctaaaaaatatggattcttgtaagccttttcattatgtgccatataaaaaatgttgctccaagcaggtttactagtttatcaccattcagatttacaagttctatcaggaacttcaaagcaatttcctagtaaatttcctagtaaaaagtccagtttaacaaatgtttaaatttttctcacttctctttatattttaaatttttctcacttctctttatatttcacaccctaaccctctccctcactttcccattccccaccacattcacctcaaatctacacagaaatcttaaagtgagatgaattaagaaaaaaaaagaaaattgccttttttcttttatgaaaaaacatatttttataataatctgaatctgaaatttttgaaataatttaggacttatatttagaaaaaatcatttaatccctctgtccttccttctttctctccttcattctttcatttcttccacaaatatttactgaatattttctgttaaagacattgtgcttgatactgccttatgagatatatttctcagattttgttcatgtcctgaagaaattttcaaagacaaaattaagggggaatctttctctccttccctcccttcctttctccctccactctccctcttccctctttcctccatcttctttctccatccaccccatcccaccccacccttatccatgaactagaagccaaggaggaacaaatgctttatgggggaaacactctgagcaagttatattggaacttgcagagatgaggatggtagaatacagcaagggggccaggaggagcagcatgaacaaggtcacagtaactggatagcaaaggggctttagagaaggctgagaagtccagcttgaaacatggaggacaggaaagggagagatgggagaggagacttcccttctcacttcacttgttacagagagatgcatgtgaggtgtgaggataaatgccatttaatgtaaggtcatgtagattcacagaaaaataagagattccagctgatgtcattatcatcgtagtcattttcatcattgtcgggatgcctctggcaggacttcctccctaatgacaccaggaccaccagaatttacacttatgctctgcttctgtgtcctgaacaccttggaggtacgaatggattctaagagacaaactcatctcgtttagagtgaaaagatgacaagcagaggttcgcagaagccacatacaaccaatgaagcctataaggtagctgagaattaaacaaaagcacctgttccgattaccttcattgttcctggttagttagcacctccctttcctcaacagaatgcccggcgcacaggggtgggatctgagtgagggcaacaggtggattggagaacatttcttcccataagtagtaggatttgatggaaaaacaagtaacttcagggtaataaaatgatggaaagtcctgatgggtcaggtccatatctaatcttaagaagggcagccttaggcagcatagtgggtgctagaatcattggtaccatcaagaaaagagtagtaatgtgaatttcaaagaagatcactttgggataatgaacagcatgacagaatccgggagcctaatgaagaagatgtgatatagtaaaagaaatatattgagtgtaggctttgaatagggcagaaggagtggaactagagaggcaagaggagatgtgattatggaaggtcttgtatatcataccaagggtctgcacttacactgtagagtccagagggatctaaatgtaggatagacaggatcaggtttgattttggaaagctcagtctggaggtggtgtggccaatgtttgggaagtggtaaagactctttcgggaaagacaatatcaagagcaaacatggactacttcatcaggtatcaccagcagatattaaattatcagtacaaaacccagcaattattactttcagatcggccttttttctcttactaggagaatatagtccagatagagtgtacgtgcatgaataatcatcatagtcttaacagaggatgaagtttaatgagtgttatcagttagagaattatttatataatctcagttttccagacaaagaaatagaggcatagtgagatgaagtgactgcccaaagtcatagatggagaaaatggtaaagatgacttgaactctgatattctgcctctagagcctgtgttctagtgtgtgaattaactaagttgttaattgttattcatactaatgggaacattctcatataactggttcagaaattttaaaaactggtaccagccttaggtagattttgtaatgcagtttgtcagtaaccaaaatacctaattcatatggaaaattaagaggctggtgtgaagcatgataattacatttactttgaaatcagcaatttgtggataaatttaattcattttgcccaactctggctttattcccggtattaaaaagacaactacagggtgcacttggttagcactcagggaaaataaagcaattattcttccacttctgctagagaacactaggtaccctttgacagtcaattgtatagactcttattgtaggcagtttgtaggaaccaacctgatggaatgggtatgtcttcctctttcagctccacaatccaatgacccttttgttcaacaaaaacacaactaaacaacaaaatgttggtagttaaaaaaaagtttaaaagtaataggacgccttcaacatggtaatctactttaagaatttagagcacatgtcagtatgtcaccttcagacatggttatagtccagtaagaattacaaatccaacaaacaaaaatcaaggcaatagagttttcatgggtaccactgtaataaattcttctgtgcaaaaagccagtcctagagaaaaattataggtagcaacattttctgaggaacttttttcccaaaggagtttttttttttggggggcggggggtgcagacattattgagaagttcaagttaacatgagcattatgactgtatcagatgacatgataagaggttacattgaactttctaacacctattcttaaattataataaaaaaactcattgagtttttaacatgcctgtacattttctcattttattcagggagtagatttaggtttttctggcctgactggatttttaaactgctacaagataacataaaaataatcatggctatattcactgagtttgtttcattttgtaaaattatgaaaaacaagtttatctcattcagtctctttagcatattgattcagtatatctccctttatagaaaagaaagaaagcaaggattttcacaagatagagctgaagactgatattgagtacatagaatgaagagcccagaaagcaacgtctctcagtgtggctggacagatagacacaaataaatttcatccaaagggttagttctgattatgagaacatgggagccttgggccttctttacttacccatacccctaacaaattagtggggtttttcctagagttcactatagtttaataagcgggatacacccagatttttgattcaacgatgaaataaaatgaatgaaggttttatttatatactctgtgctttgctacttcaactttgtgcaaatggaaagaagctttattgcattcagagagaattagatttggaacttggtcagtggcacaagatagaactataacatattgatgagacaactttttatgtgggaaaataattagcgtttgataaaatcacaaagaagcaatgggtagggactcatcaatgtgtgaagtgactgagcactgatacacataacacagttgacattgtctttaatatttattattgaataaatgacagcatgtgaacaaaagtgtatgcttttcacactagtgaatacttggtcattaaacaatagttaaataaaaaacacaactttataccattggttataatttaggaaaaagaaaacaaaaacatctgacaatagactggattaaaagttaaagattttattttgtggttaaagactacttctacagtagaaagaataaaaacatatacatattaatatagattgcaaatttgctaggtccggatctttgcacttgtgttctctcccaaaataatggattttctgtggattttattttggaataggtatttctcctatgaagtctgataaatgatattcccactctaaagagcaagcagctagaatgccatgtttttgatgcatatttttgcagcacagaggggattaaattctaaatgtctcagctgttaaaggccccttcagacttgcccaaaatgaagaacaaagaaggagaaagctttccctaaagcaattcatcagatctatttgggcacagtgacattttctcagaacttatatggataagttacactgaacagttcaagggtttgcagctgcttggaatatttaagaaaaaaatatctctagttcttatgcatttcatatggtctgaccagtgctcaacactagctaatgttcactgaggctgtaaccatcagtagttatgtcgtaatagcttttgtttctcgagagctcattatgtgcctggtactgtgttctgcattttccactcattgtatcacttaatatttatgcttctgatcttaggggaatgactgtttatattgcatatatgccatttttttgcagtatgaaaaatttgttgagccgagtgtcatacattataaactgacatgtacttactgttgtttaatctaattggtggttgttaaatctaaaggatgttctgactacttcaataaaggcagcagcaatcacttccataaataaatcattagacgtagaacacatgtgtaaacaggtagagtcttctaatttgctaagtgttgatggactcaaaacagttactagaacaagccatagatggaatacatttattgatggaataagtcaaacaacttgaaacacggcattgtggtgtcttaaatggtaattcaaataaaatgaagtgattgatacatttttacttgtttggaaagtggagaatattttagaattgcaaaacattgcacttttatatacatttatcctttcattatcctaatgtagggtagataggacagttgattgcatccaacttcatttatttggcttattatcttttgttttatgattttaactctgtctagaatcatctcctaccacttagagtctatgtattcttctgaccaaatgacttcaagttttctgaccaaattaatggcctttcaaactgttaagccctctgcctggaatgcccttcacatcttctcttggcgaggccgccgcggtcctcaggactctgttggaatatcaccaccccagacaaacattccctgaactgttcctcctatacttacccttcctctggcctcccacagcaccctgtgtatacccacattagcatcatttgacacctggtattatagtgttctatttactggccagctgcaccaagttgtgactctttggaagcatggtgtgtcttttatggttttatttcggttttttcagcacctagccaagtctacacagagtatggactcaatgagcgattgtggcttgaagatgtaaattctttagtatgtattgcatgatatacatgtgagacatgcatgtatatcatgcatattagtactttgttcacttccccacctcccacatccctatgacacacacacattctcattgcattcagcgatgtgtagccttctgtctcatccatggttttcattgtagttgctgaagcttgaggtcacgatctggtggaagtgactactagaagaaggcacatgtgcattgtattctgttgtacttgtcatctggagcacacagtgtacttgaaggtatgccttttctagtggaatttcagagtggtttcatactagcagtatgagaacactttcatgctaaacaagaagggcaaagaatcaaacccgggcaatgtaacagaaactgagctgggggcctgagctgcagaaggaacctctgtccactgcagaataccactcccagtggcacacagaggagagggtgtctggcttctgctctctggttgctcccttcaccctctctgtgctcattacttggttccctttgatagaacatgagaggcagacatgggttgccagggagcaggcttttacaactgctatttcatcctgttttgaaatttctctcaaaatggttgacttatttttctctcacgtatgcatacgtatgtgttgctgcacacaacagtggattcagaaaggctatccacatctttgtccccaaacccccagccatgcaatgcaatatagcaaccaagagaaccagagagccgtgctgagctctgaataaacaaaagcacaaatcccatctgggtctccttcaaagcaagctgctattttgcaacaagctaccaaatgacgattaagaaaaaggttcttacctgtttacttaatgggtgactggcctctttgcttttatttagccatctgttctggtctatgtccctttaaacttgtaagatccatcacttcattaaactgttaccttgacacattgcaatgttgtggacataatgattccacagaggagcaaattaaaacagtttttcatgattagaagcttaaatgaggtaaggctgtggtagttagtggtgagataaggggtgttgaggaggcagagctcaaggggctttcaggcgattggaagattaggctggcgagatggagggctggggcttttccaaattatgggaggtgagcaagaagcaagactgcctttgggtatcgctgactcctgggggctggttccattgcccatacagaggctgtgaccctggccctgggaggatacaggaactgccttcaggtttcttgacttccctaggagagtctgcgaagagcaaaaagaactaattccaccgggtagtggtaagctgaaaatgcaacaacaataaacattttggtctttcacagaaagttatgtggctttccttaagttcgaagaagaatcagggggcccagcccaactatatgaaagaatattttattgtgtctttaccctgcacttcatggcttcagcagtcctccttcttgctctagacttaccttccacctgactccttgacagttgctgaaaactagaaagtcaagggctttatctttttactatcttatgtcagttcctgctctgacaactctggtttcttctgatatgacccataatattgccgtcacatggaccccaaatctgaggaatctctgaattttccgtcagccgcttctgtcctgtcagtagcccaagttctatttctcccacctaaatcaagtttctcacatctttttccaccttgttatttcttcttcttctgccctagttttcatccctcattacctctgtcctaggcaattgggatagcctcctaactagtcactgcctacctatactctctccctgctccaaagcatcttaaacactgatgtttgattataactcataacttccccccaccccgccttttttttcttttttaaaaaaattatactttaagttctgggatacatgtgtagaatgtacaggtttgttacataggtatacatgtgccatggtggtttgctacacccgtcaactagtcacctacataaggtatttgtcctaatgctctccctctcctagccccccattccctgacaggacccggtgtgtgatgttcccctccctgtgtccatgtgttctcattgttcaactcccacttatgagtgagaacatgtggggtttggttttccgttcccatgttagtttgctgagagtgatggtttccagcttcatccatgtccctgcaaaggacatgaactcatccttttttatggctgtgtagtattccataatgtgtatgtgccacattttctttatccagtctgtcattgatgggcatttgggttggttccaagtctttgctattgtgaatggtgctgcaataaacatatgtgtgcatgtgtgtttatggcagaatgatttataatcctttggttatatacccagtaacgggattgctaggtcaaatggtatttctggttctagattcctgaggaatcaccacactgtcttccacaatggttgaactaatttacactcccaccaacagtgtaaaagcgttcctatttctgcatgtcctctccagcatctgttgtttcctgactttttaatgattaccattctaactggtgtgagatggtatctcactgtggttttgatttgcacttctctaatgaatagtgatgatgacctttttttcatatgtttgttggcttcagccaaaacagataaatagacaaatggaacagaacagaggcctcagaaataatgccacacatctacaaccatctgacctttgacaaacctgacaaaaacaaacaatggggaaaggattccctaattaacaaatggtgttgggaaaattggctacccatatgcagaaaactgaaactggaccccttccttataccttatacaaaaattaagatggattaaagacttaaacataagacctaaaaccataaaaaccctagaagaaaacctaggcagtatcattcaggacataggcatgggcaaagacttaatgactaaaacaccaaaagcaatggcaacaaaagccaaaatagacaaatgggatataattaaactaaagagcttctgcacagcaaaagaaactaccatcagagtgaataggcaacctacagaatggtagaaaatttttgcaatctatccgtttgacaaagggctaatatccagaatctatgaagaacttaaacaaatttacaaaaaaaaaataaaaataaaaaaataaacagccccatcaaaaagtaggcaaaggatatgaacagacatttctcagaagaagacatttatgtggccaactgtcccctttaacaaaacaaaatttcttttggctttccatcacctagcaaacttagtatagatgtattagcttgatatctgaggcaattcagaataaagttatcatttgtgtttctagctttttctccttcttcgtgctccagtaagacaaactactgtacgcctatgagtaactgtatgtattcttgtctgcgtgctgtttcctctctctggaaagctctgttcacacatatctgtcaattaaaacacatgcattttatcaagctcaatttcaaagacatctttgctttctctcttctcaatcggatgcagttgttcctgtttttcttccatggcagtatgtttagaggaatgttctgctgcttggcataatttttttttcctcttgttacttttttgaatcttacttttgcaaatcctatagcacaggcagagtttcctactcatacagggtgctagatacagaaacagaagaatgagtgataatgatactgtgtctacaagaatgtgaacatccattcattcatttatttattcattcatttgtttcactcaaatgttctttgaatgcctgtagtatgtaaggtaccatgttaagagcctgggatacagagatcaagatgacacagtacattccagttctctaagaactcacaaatccatgtaggaaaatcacataaataattacacagtgaaaaagtacaacaatagaagtgtctttaaattatgggaatgatgggactttacctctgttagagtggataggttgggggtcaaagcatggtggtgaggaggggattgagcaattagaaaaggtttcctgtcattggaaatgtctgattggggttttgcaaactgaataggagtgtacaaggaatatagtgagataaggaagggtggagatgcaatggaagagttcaagaaagcagctctgcttgctctcagcagcccagcacactaggacaatttggtcaccaaataattattttccatttccaggtaaaatatgctgaatgacagaatccttcgacccctatgaaagaaaaagagaagaataaaggaacctccttctgtgactgcctttggttgaaagtcattcgttcttctttttgtttttttaatgttttgtagagaaagtctgtgattgctgtgagcttcatagcagcgttccttttcctgctggttgtgcgtcttgtaaatgaagtgaatttcccattgctactaaactgctttggacaacctggtacaaagtggataccattctcctacacatacaggcggccccttcgaactcactatggatacataaatgtgaagacacaagaggtaagatcccagagggttacctagcagttggagagtatccatggtaacagcttttctttaggagccagagggcttccaactcactgaacttactctgtctgccccggagagcttgcttgggtccctgacaacatcttctgtcttattattcttagacatttactgacaaatgtctaaatctgccacccctcctacattaaatcttctgattcactggcttcatatggagtcaaggaagcaattacttgttttcctggtggtttgtggcacaacgtacatatctctccatttagaagctctgattagcagttaccagctggagaactagctggcttgatttcctgtaggtcaactggttggggagagctctttatagaacttcaaaaatgcatttatactccttaaaactctgtaatccttagacctggagctagaaaaggccaagctgattttaaaatttgcagtggctgcagagataatgggatttaaagagttttcaaatttaaaggggttaaaatcgtgtaaatcctataatcacagaagctttaaatctttgtagccaattggtagtacaggagaggatggaggtatattgacaactagaaagtgcacactatgctagcgcttttgcaagcaagcatttgtctcataaagtaaaataaaaataatgaacctcacaaaatatgtgatgtatatagaagtgcttaataaaattgttttcactattcatttctatggagttggatgaatgtgagtttaatattcagagacacaaagtccaagcctgtttgaaattgttggtaacaaaggtacaagctaccagtgtgtctacattactagggagagtcttggatcagctcccatcgaaaggtcattttgtaaagatactagagggtagagtcatgcatggaatgctactcctgtcctgagagttattcttagcattctgggaggatgctaagcttggtctacccccttttgtagtcaatctcatatctgagtcattgcttctggttaatttgattcttcgaaaattgtttctgtatctgcaggatttacaggcctttattagaattttatagttgaaaaaaagcaccattaataacacataaattcttagaatctttgatgtttatcctctaattggttttaaattaatttttttacagtgtctattgcttgaatttgttgagtgtcctaataaattgattacctatataaaaatgtatctctttgaggagagtttgtctcaccctcatcttttgttacttttatttctggctatcatttaatattctataactctactgtatggtgttaatcaattcacaagtgcctgtcacaggctgaaaatgaaacatgtgactaaaatgtctcacgaagtattctcatatgggaaatcccgtcaaatatcaaagaccctttcatttctttaaatattaatgaatttgatttcggagtgtgaaaggaaaaactgacctatggatgcagttatttaattagttctattaactgggctatctttgaaattattttgatgtagtttttaatacaatgattttacaaaagaatattgaatattattttgctcctgcaaaggttatttcttaggagaaaacatagttactggaaagaatctgggctttggaagcacacaggcatggtttgagagtcagttctaacatttaatgaacttaagcagtatatttgcttttgggtaacttccttaacctcagagccccaatttccttatttgcaaaataaggataacaacatcagcctagcaaaattattttgaggataaaataagtcgaagtatatgaggttcccagctccaaattgctattcaatgaatgaattgcttttgctttctctgtactttccagtatggcataaagtgttcagtatgaataacatcaaattatcacagtccagagtaccagaatttatatgtacattttaaagatcctggacttgggggaataaacacatgtaggggttctcaatctcattagtaatcatggttttacaaattaaaaccacaatgagaaaaatatttaaaaatcacaaagagatactaatatacatgaaacgccagattggcaaaaaattaagaagtctgacaataccaagtgttgacgaggatgtggaacaacagatactattgtatacttgtagtgggagtaaaaattgtaatacccactttggaaaaaacagctccactgttgtattgagcaaagttgaagatttacatgctgtatgcccaaccatttctagtcatggatatctacactagaggtgctcatgaacccgtgcactggaaggcatggacagaacatgtagcagcatttttcctagtagccggaacctagaatatacctaaatattgatgagtaggagaatgaattagagtcgtgccacatacatttggaataccatacagcaatggcgatgaagaaactgcaagtatatgtgaccacatggaagataaagcaaagtacacaatgtgattccgtttatgggtcacaagaagagactaaactaaataatgttgcttagggacatatacaacggtaaactaaaaaaggaaaaaaaaagcaaggaaattattattatgaaagggggtctagcggttacctctgagaggagtgggcagcttgtgatcagaatgggtttctggggatttagcaatatactatctgttgatcctgttggaggttacacagatgttcacagtccatttattaagtataaatttatggtttttggacttgtatgtctattttattaaaaaattcaaaatatattctgatcccaggaaggatgtttatttaccatttaccatggggaaggaatcatacaaaacaattcacctaattcagcagcaggaaataactaaaaagaagcaatgggatattaagctatctaaagcaaactaggaatatttgaaataggcaatttgattttctataaagactaacagacacataagcaacttatttctctagttctggtctatgcatgatagaccccatattgcatcatgaatgcaggtgatagagcagaaaattttgcatgaaagttgaaaacattagaacactcaaagggaatgacagattttctcctaaattcaagtagttctaggctaactcgggagaaaataaaaactttgtgactttttaccacccttctcaatgatttcatcctttgttctgacagtcccacccctaccaccatgtctgtgccatgctcttactcccaaatgattgtgcatttgttctcactgtaatgtcctcaggcgcaatccgttgcagaaatggttacattaaataagagacacagtatgataaagctttcaagagccaaagtaatatagctgaaatgataggtggtgagttcagtgttctaggacaaatagcttaaatagtgaccacaaaaccatgcttcagagattatcacacactaagtccctattcattctattctaattctgagaaggtcaataggcttagctgaactgagtcaggtgatcaccaagctgatctacttatttcaagatcttggcccttaaagttttctcagaagactttccccttaaatgcatatggtttctggaaattactaaacttcttagtatttttttaaatatgcaggcatgccagcagtgatttccagacctagagcatctgcaaacaccatggctgttaatgatgggtttactgcctgatgcttcagcttggccagaagttgctgtaactagtcatagattttatgagctgaaatgattacaagaaagaatgtctctttactactgtctaaagaaaagtggaatgggaggcagcagaattaggtcaaacatctagtggacactgtggagtgtagggttgcttaggagcaaaatctgattctttagttatcttttaaaaatagatgactctggtccctttggattggcacaagtgaaaatatagctggtttgtgaatctatgacagcctgccctgaaggccccacatatagtaaattatacccagtttaagctctgcttcattttatcaattaatctgttttttttaaaaaaaataatctgttcccaggggaaatacaaaaattaaaataaaaggaacacaggagagatgtggttttgcttatatttcaagctgtttatttttttccctgatgtagatccataaaaaagagcatgtgaaaactgtgatgactattataaaggggttaaatagaaagatcaaaatattcctcccactgtaataatgatgatctaaatataacagagttggtgattggctttaactctttacctttacccagtctccccttcactttctcaatgagtgtaagctaaggttcttttctatgggggaggggaagtcttgagaagcagggaagaaaaatgagtgccaactaactgggtgagtgctgaaattctgaaagtcttcgctggccacggagccccaaatttctcatcaacacgtgtttaagctgatagcaaccatgatttcaaaccaaagcttggatcaggagtgatttagattttgcaacagaccctgccctcgcctccctgctgtgtcattaccgtgtctataatgcaatcccccattttaaaaatgacaatgtggagattccacctatagcattatggcagaattactgtattatcaactggctttggatatggtaaaaagtatatgtcacccatgtatttttccagaaaaaaattaaaaacagaaacgtgcttcacaatatcctaaaaccctattttccccttgaaacaaatgctatttattttaaattattaattatagcagacagaggaggtataaaggactaaggtagtccagggcttggttcaaggtaatcttgctttctcctgttgagatcatggcagatttttgggaaaaaggagaaaacgaacttcaagctaggttctatttgtagttgcctatgagggactcagtcattgtgttgtcttttttgttgtgtgacctggtgtgaagacattgctcagagcaagcagcctgcagtttatttgcatttactgctagatgaaaggatccagcttgggtgatcaataggatgccaaggccagatcttattggtaatcagtgagggtgacagatgtcttccttagacctgataggatcttccccttaagatgctggggctacagaggatttctggtatttggggaagagtgccctttccctgggtgcctgaaatgtgccaagtggagaggtgcaagattgccagaacacaggaagcaagtgcagggctgcatactgacttactcgacaatttaatgaggctgaagtatgcctctttaaaaaatgagaacgttttaaaacctcaagtagactaaataggaatatttaggatcagttgctgtgacagacaggccacactagcctaattaaagatgtgcataacatattgatgttgcaatagaatttcccaaattatggttatagtaacaattaaggaagagagctgactttcttggtgataaaagcacacactccacacatttaaataaatgtacacatgtaactaaagctgacatgaataggttttctatatttggtaatagaggctttgggttttacgtaagtatattgagagcaattatgtgcaaatgtatgtcccaaaagtttaaaactgatccatttaattgttaattaaaatccgaacattcccatttatgtaatcataaagcaaaatgaaatttgagtattaaatgttatagaaaaggaaacagctaaattaacatataataaatcaaaactttgtgactttttaccaccctcctcattgatttcatcctttgttctgacagccccacccctaccagcatgtctgtaccatgctcttactcccaaatgaatttgacatgtgtgtattggatttgtcattttaaggataatttatcatttttctcaagtatgaaaggatatattttttgagtggagaagagatgactatgtttctcagtctggttgtgaaatagcaactttcaatcaatgaccatatctccagacaatctatgagtgccagatgagaaggacagatgccactgtgggttagaatatttccaggaagcttttgtgggagaggtgagacatgtgctttggagaaagatttggatgggacagaggaagaagacaaagcagagttgggtaaaaaagcaaaggttcagaatatgtattgtgcattttccttcagcccctatgactcccagtaggccaaggacactatatggaaagctacagtaaagccctaatgtctatgctggtaatcgtcattgcctcacacttggtggatccatttcatacctttctctggattcaatacctttagtcctaatcgtgtggctcttctttttgtttggctggttatctagtcttgtagtgctcttaccttggccctactgccctgcatactatgtagggggtcacttctaataatgcttctctctgtgtacccctgacatggacacaactccccatttccaaggggcccctgaagtactgcccaggcctctgcaatcctctgacttccagagaaggaagtcaggcacatgtacaggtaatacataggtcaacctggctggaacttactctggaatatagaagaagatagaaaatgcattcattgggtaattatgatctgggaatgtgagtgggattatggaaagaccacactcctatttagacataggagtaatacatacatgtaatatatatatacattcatagttatgaatcagtatatacaagtatatggaaaatacatacatgtatgcatgcatgcagcatatacatgcatacatgttcacagatcaagttctagccacttaaatacaaacatacatagaatatatacaacatactatgttatacattaaaatggtatgtaaaatggtgtgtaaatggtgtaaaatggtatatatatacacacacacacacacacacattatatatatatatatatagtcaggtaggtgtatagtgtgccttttgcggttgtctactctccaccttccctttattagagaaggtggcccttccttttgaccacaagggtgagcagaaaagtcaggctagtgattggtcaatcaagtgattggttgaggggtgggctcatggcccaagatgagccattctgaagccttctcaaattttattatgtttttctgggacacactggcaggaaaggcccccttttctctggtggtaaagctgttgggatgtgattctctggatgtcagtagctgtgttcccaagacagaatgagacaaagacactgagagaagcagaaacaagttgcaaggctaatgtgaagacccagacaacacttcaggtcctgagctcaattcttgaaggcagcctcccctcccatcccccatggtttgggtgtataagccaatatatttgtcttctttttacttttgctggtttgaactgtttttgtcccttgcaaccaaaaaagtcctagctgatatattgtagttattttacagccaccaccaccaaatgttcagtaactcatctttaaacaaggtgccatctgaaggaggagaggagtagtctttccaaatctgcactctcaaacctgctggggggccaaacacaagtcacatccatcagtcagtgcaggtgtctgcaaggggtgaacgctgtctatctttctgcttaggtgcatattgcttagtaaactagcttatccttttgtggtagaaaaatgaaggtcaatttcccaaggttataatgccagaaaatggctggacaagactgactactacctgaattgctagtcgtactcaactgataaatcatatagtttcattataattgttagatgaaaatttctctattgctgtgaggcatcagcagtcaaactagattgattttcactttacaaatcacattttttattgatgaaaaatccattattatcataggttttaatgtagtgatcggttcctcaggaagatataccgcagttttatttattacagagccttaggtagaaaagtccccatttgccaactatcttgttaacgcacttgaaaggggcctattagaaattcaactatcaaattacctcatttgtgacaagcaaaggaaaacaaaacagtgtatctatcacaaataccttgatttgagggttgaaaaagatgatagaactcatgtcctgatgtagagagtttttctatagctcttctcaagctgatggcctggcagagtgactagtgcgaaaagctttcatcaaatggcaattggtattaaccaaataccaaatattttgaaaagtgcttattctgttccagacattgtgctaaggatcagcaatgaactgtaatttaaagaagtgttaaaattggggttcaccaaagaagagaacaacatggacccaagttaggagtatcctggaacaataccacctagaaggtgtttgcattgcagcctgtaatgatgatggctgagtaaccatcttacacaagaaattcatttcactgttcttaagaatagtgaacattcaagtaatttcaattaaacacttatatttaatgtctaaaaggtaatttgtcactaagtagatggcatcaaattgtgagttcttatttttcagagtagccttacaaagccttattcacaaaagaaagatagccattacagaatatttcatttcaaaaataactatatgcttttatatcaaatgttatccaccactgccccccacccccccacaagtttgggaaatagtatgtctggttaaccgagtcatctgactaataggcatttgccaagtatttaataaatggattctttatttattcatttattgacatggagtctcgctctgtcacttaggctggagttcagtggcacgatctcggctcactgcaacctccacctcctcggctcaagcgattctcctgcctcagcctcccgagtagctgggattacaggcacctgccaccatgcccaaaaattttgtattttgtaaaaatacaaaaattacctctagaaataccctgctgtggtgtttcataatatgtgtatttgagtatttgctctgttgtcttcttcaaatatgaacatttatgaatcccaaagtatacctggttcaaatgattttagataagggattgcaggcctgtgtcaaacacagactataaaaatgattaagaatgaataaaatacatgggaagcaaagttctagcaaaaataaaatatctctgaaaaataattgaatataatgactagaaataaataaataaaattgtaatacctcagtggttaggttaaatgacagtcactgtgttaagtattttatgtgccattttcttttagctcttacagagtacatactattttactgatttaactaatttttcaaggcccccaaagtattgattctatgctagtgtctttcattgtcctgtgtggcaaaacaagaacctaagactatcctagtcaacaaattcctttaaatggtttcacagagtgtctgccaattcatgaagtcagtaagttcatggaatcccatttgttgaatttactacatgcaacgcactgtgctaggctctgaaattgtaaaaaagaaaacactttttgcctagggataaataaaattttttcataatgttaaaggctaataaagaaggtagaataacatgtgaaagattattttaactctttaaatgtagtcatagaaagaaagtttggagataatacttcaaaatattaactgtgatggtctatatctgggttgtaaattttagaatttttttaaaaaacatgttttccaaattttctacaatgagcacatattgtatttattactagaattttttttttttgagatggagtctcattctatagcccaagctggagtgcagtggtgtgaccttggctgactacgacctctacctcccaggctcaagtgattctcgtgcctcagcctcccaagtagttgggacaacaggtgtgcaccaccatgcccggcttaatttttgtgttttagtaaagacatggtttcaccatgttgcccaaggtggtctcgaactcctgagcctgatccgcccgccttggcctcccagagtgctgggattacaggtgtgagccaccatgcccggttgaagaagtattttttaagcaatgtatatctgtgaaacactctagaactttcactatcatttaaagaataggatttaaaatgtctagataaatatattgtttggaatactttaaaaagtgaatattctcccattccttaaatgtgggtttctcctagtgactcccttaataggactacaatatggaaaggagaataaatagtaactgtggtggaaaggctgacaaacactatctcagctaagtgatcaaggttaacatcaatagtgacaaatggtgttggtagtatatacccttggtatgatgtgatgaaaccgacactttaccactgaggccatcttccccaaatcccataagcctgtttaatcatgagataaatatcagacaaataaatattgggggccgttctacagaacacgtgatgacaactcctctaaactgttcaggttatcaaaaacgaggaaagtctgagaaacccccacagccaagagtgtcctaaggaaacatgacaactaaatgcaatgtggtatcctggatgggctcctgaacagaaaaaaagacattagatcaaaactaagtatgagtaaagtatggacttgagttaataataattaattgtaacaaatgtattatactatacgagatgttgataatggagaaactgagtgtgggctatatggtaactatcttctcaatttttaaataaatctgaaactattccaaaatataaggtttgctttttttattaattattgcactttcatttttttaatttttcacatatatatatttttattatactttaagttctagggtacatgtgcacaacgtgcaggtttgttacatatgtatacatgtgccaaacactgcatgtactcactcataggtgggaattgaacaatgagaacacttggatacaggaaggtttgcttttaaaaaaggtatttaggtttttgacctgtgcatctggaaggttggaattgtcattgactgagatggagaagaccataggagaaggtgaattgaaaaaatttgaaatatactagtctagccccatagggcagggatgtataagatacatgcattgtgaatacatcactgttttaatattctgtatttaatacaataaatattttggcagagaaatagtgagtattctagaaataattcctgtcctctttaagaagtacaagttcttcaaagattccccaggaacagctgtgcaagtcagtgtggctttctaatctctttcatctatacttacacactataacagttttttctattgcaatgcagcccaagttttttgcaaggtaaattatttgtgatattcttaggaagaaaaggtagaaagtaaataactttttggtggcttggtatggtgttgtattttgccaataactatttatttccaatagtgtttaatgatatttattggattgaagaaagttagctatctttcaggtatctttcccagagctcacaggacaatatttccagcatgcccccggaatggtagacatgctgaaaatattgtcctgtgagctctgacaatctagtacttgtcacaaataattatttttacaattattattactattattattatattattgctaccattggtatacatacacacaaatatatatatatatatttggtctttttgtgctctttattttgtttcattgatcaacatttttttggtaaatgctatttttatataattgttgcttgtagtattagacctacttctttttgctcatcttttttcagaaatctttaataaattcacctctgtatgaatttcagcatcattttattaagtagatgggaaatcttgggtgtgtcagaaaactatttgcataataatgctgtgtaagaaatcacccaaactcagtggcttaaacaattgtttattcttgctcatgtttttgtggaccagttgccatccaggctgagatcggctgtgcttagttccaaagctgcaagttgggtcctggtctgtttcatgtgtctctcttcaccaatgaccattgagccacctggggcatattcttctcatggtggaaaaagcacaaaagactaagttcaatcttgaaagcacattgcaagcttctggtggcctcacatctgttaacatcccattgatcaaagggaggcccaaaatgaaggggggagtaaagtgcacttcacccaccatgaggtcaagtcaagttacatgggcaagtccaacatcaatggagtgggaagtatactcctcctatgaaggtgagagtagagagagtgactatttgccaaaaataatttcattcaccattctggtggaatatttatgggaattgcattaaatgttaacttgaaaacagacactattagaacaattgccttttctactaatatcttatctacacaagtaattgttaagtaatttgctaaaaaagactatgaatgtacatttcaagtagacttcctgtggtatctagtaggagcttaaaaaatgtttgctaaactgttattcatggatattttgtatttttcttatcttgagtgccagctcttaaaatgatatgtgtaactattttagcatgcaaaaatactattaattttatatatgttttcctgcatttggttgctatactgaactcttctaattaagttctggaagttttgggtttttttttttttttttgcattgtttaggtatgcaatctcaatgtttttaaataatctttttctcatttcttttcaatattgattgcattgactagagcttatcaaacaatagtaaacaatactgtaagatttttaaagacagtacttctaatgtttactcacttagtgtaaagctgacctgacctagttttctttaccatattaaggaagaattcaaatgtttttaaaattatttttctaaaataatgcctatgtgtgttgagtttttatcagatgacttcctggcatctattgaaatgactggatgatttttctcttggaacttctcaaggttgtattttcttattttgaaccaccactgccaattaatttcttttttttcatagtgtgtatattagtcattgttctctagagaaaaaggaccaacaggatgtgtatgtatatatgcgtgtgtgtgtgtgtgtgtgtgtgtgtgtgtgtgtgtgtgtatgtgtgtatagagagagatattgagaaggagatattttaaagaattgcctcatgagattgtgggagtaagccagtaggctggagactcagaaagatttgcagtttgactccaaaggcgatctgctggcagaattcctctttgctcagggacaccagtctttgttctattaaagctttcaactgattggataaggcctatccagtttatgaaggataatctgatttactcagagtctactgacataaatgttaatctcatctacaaaatatcttcacagagcatcccattttgagaagcagcctcactgtgtcgcccgggcgggagggcagtggtgcaatctcggctcactgcaacctccacctcctgggttgaagcaattctcctgcctcagcttcctaagtagctgggattacaggcacctaccaccatgcctggctaatttttgtatttttagtagaaacagggtttcaccatgttggccaagctggtctcaaactcctgacctcaagtgatctgcactcttcagcctctcaaagtgttgggattacaggcgtgaacccccatgcctggcccagaataatgtttaaccaaatatttgggtactatgatgcagtcaagttgacacataaaataaaccatcacaatgtataattcttttaatgaattgttgaatttgaatatttctcagaaatattctttgggttatacaaaattattatcccatataaaagaagaggcagttgaggctaggataggtaatacaactcacccaaagtcacacatgctcaaattggcaggactgatatttgtccctggctccaaagccccaggttttagtcatataatcaattacacagaaaggacatccaatatgctgatacattattcttcagactggccttacttcctttgctcgggagtcacctgcctataactctcatatgtgatttaatcttgattgtttttgttgaattggggaacttcacgaatgagaagtagaggagttgagatttttactttctggcatgagctaccgttaaactgattatctcgctgcagtccacatctggaccaagtacaaaagtgaagcctgacttcttactctgtggtgctgataggaataacagccacaacaccaccatttttgccatcttgctgatgaattgacctcatatttctctacctacatttttcaaaatagtgctcttttatgagttactcaagccccattttaaaagcagtgtggttgataagtatgtttcatacctgcttgtactgagcttttttaaccttgtgctcttgaaataatatgagcttttggacactatgtattcagtacagactttcagagtgaaaatgttgattttcccaaattaaagaactaggggatatggtaatatatgctctcaattttgaattaggtggaaattgacatcgtttgtcagaaatatactgaggataaaaatgaggtaaagttttaggtgctgagctgtgtgccaaatagcccttgtgtttctttcttgaacatctacttcaaagaagcagatttgcctttgatatccctgggagccacatgaatatgaactgactccaattgccctcatcatctccagaatttattttttatttttttagggcatgagtctgtggtcaatttgcttatttgcttctccaaaccagcatgatcattataattctccttttcatgaaataacccactctcagcctgttgttaatcctacctagaggttgggagtggagtcacctaacatgagggcattcatctcttcagtaagtggtgtgcttgtgtcagaaatttttatgcagacaaaaacacaggaatcatcatggcaacagaataatattcaccacctgagccaccttgacatttctcagctagtaggaagctttcttttttcttttgtgcttttaacatagaagaatgcctcctaagttttgcaggctacatagtcatgcccatgagcctcctcttttcaatgcatcctgcccccataaccatttttctctgtaagtgatgttaactatgcagaaagccaattaggagattctacttagaattccttctcttaactgtttctcaaagcttatgtggtataactgctagaaaaagatgtttgaaaaataataatatattctatattggccattcaatgtctcaccttcatgccttagctcaaactggcaagcttctttatgccatctctacatgtagaaaaagtctaccgattccttaaaatcccatccaaaggccatttcctctgtggtggtttgcctgtctcacctccttagcagtcacggctctctctcatgagtccttttaacactttaataataactaataattataaacacatggatcattctttaggttttacaaagtttgttgacacatcatttcatgtaacaaataatcttgtggctttgattatattctccatttttattctctttctctctctttatttatttatttatttatttattttttgagatggagtcttgctctgtcacccaggctggagtacagtggtgcaatctctgctcactgcaacctccatctcccaggttcaggtgattctcctgcctcagcctcccaagtagctgggattacaggcatgcaccaccatgcccagctaatttttgtattttcattagagacgtgatttcaccatgttggtcaggctggtctcaaactcctgacctcagttgattcacctgcctcccaaagtgttgggattacaagcgtaagccaccatgcccagcctatattccccaacaatggagaatattaaacaaataaacacaggagggttaagtaattttttttttcttgagacagagcctcactctgtcgcccaggctggagtgcagtggcgtgatctcagctcactgcaacctctgcctcctaggttcaagtgattctcctgcctcagcctcctgagtagctaggattacaggtgcacaccatcatgcccggctaatttttgtatttttaatagagatggggtttcaccatgttggtgaggctggtgtcaaatcaaactcctcacctcatgatccgcctacctcagcctcccaaagtgctgggattacaggcgtgagcccgtgccaggccaagtaatttgttaagtgacacacagctgtcctctgtcttctgacatcaaatgtcttcctgtgctagctatatactgttggtctcaaattatcattatcttagccaaccgttctggaggacatctgtgtgctaggcattcttctaagtggtttatatgcagcagcagtaatagccaacatcttcttgccagatatccacttagtcttcaaagcaaccctatgtaatagatactattattattccaccatttagaaatgaataatctaagggacagggaagtcaagtaacttattcaaggtcagataactacaggaggctgctgcaagtgtcggtctttccatatccaaaatctggtgtcttagtcagtgaaaatgctgcaaaacctcaaaattgacagaggccaccctttagacataattgctacaggaatattgatcccatctcctcttgtatttcaaatcttcagagtgcattccacagccttttgcctgtggtatccaagaccatagaggcaagaatgtctgggaaatgtaggtgttagattgccagcctctgctgggtaagatggcagaagagcatagaggaaggtaaaaatgaatactgggtaccagtagacaatatctagcatactcgtgataatgatgtaagactactgccatttctttagaatgcgatcctggtgagatggccaatgaatgtttagtcactcagatatgcagtggtgtccccctaccactagggggagatgaacaaccggcatagtttgatgtcttaagaaagattatttgttcatgagtaatggaaaaaaatactgagaaagaagtggttgctttctatggcttatgaggagaagcttatgctgtctttaatgaaaaattaatcagataaacaaatgtccagaggaatatatccagatgtattcctatttacagtcacttagtggatgtgccagcatccaaatgcttccttaatctttcaactatctaagtaatgattgaatagaacctttgctccacctttcctgcttaaatgctactttattagcattacttcttgtccataaccatcattgcctaagtgctctgcaacttacctatttaaatactggatagattgtcatcagttcctcatctgaccaatcatttgtttcaccaattacttgcagattctcattctcgtaatggtcctaccatggaactgttgcatctccctgttttcctcaccacctccagctaatcagggtagagtttgctctaatgagcttatgtctcaggagggcaggtctttctgtgaaaaactgtcaaaactcttctaatgggaaacaaatattaatgtaaatgtaggcatttatttgccaaaagagtagtagctcaagaattgctagcaataattaccctacttgccagtgtattgtgtcttttttgattattcctctctttctatgtagagacctgcctaaaatatctcatgaatttttctccctcaagtgtgcatttgtgaagtttctcgaaagattgattggaacacaaggatttcagtttgtggcgtcctgttaatcaggtcagatttgttaaagtcattagtgttaaaaatttctttgtactcacaattctccttacccagagttagttctgtggcagtgtattagtgtgggcagggtatcttccatcaacttagtgtttttaatggagcttaccagagttaatgacagtggcagtccccccagggaaaacaagacagttggctcagatgtcttgtgggagctgaacctgctagaatgttcttctgggggtttcatcactaatctgccaacaactggagtctgtatcctattagtttctattcactgaagttgtgagatgccatgtactttctttttccagtcatctcatttttctcatcttctaattcgtgaaagggacacagaaatatttagaaaaattgggattctgcaaattgtgagattgattttcctatgttcatctcatagtgttcagattgagataaggtactaacttcactaagctcttaagttgtccactataagacaaagtcaatactacttccttggaaagaaataaggccatgatgagttaggttttcaccatgtgtaggttattctaagggtttcaggtctaatggcatcccctgaggtagtaggtagataagctggtcatcaggttagagcctgtattttgaatcaattcatgtgtagtccttacgaccattcattctacagattctggtatctgcccacctctcaggcccctctctcattgcgccctgtacccacagtactcatgctttgcccattctgaatcattttgaatcctaaattatacagtatactttatatttaatacatttctgaattttcaagtgccagctcctcccctcatttacctggtaaactccttaccttctaggtcttttctgattgtcttcttcttgttggtgtgctcaggttcctagtgtagcttatacctgattcaaccagaacacctatagcaatttattgccatcacttttgtgcagagctcctcttatataaccataggcccctgaaaggctggaccctctttgcatctcaagtcttcttcttccattccctgcctgccattagtggtgtctccatgcaggaagaagcatatccaaaaatattttaaattatgtaaatttcaataaagtatttatttcaaccctcagagaaaatgagatcagatttgtacagagatgtggttctcctcaattgtggtaagtttaatgggtgagaatgctgagcaagatttgcattgcatacaaatcacaggaattaggaccagtgattggaaagttcaaaggaagatttaagctcagtataagtaataactttctgggcattaagactgttcaaaaatggaatgtgctatcttttcaactagtgaggtctcaatgactggaagtatttgtaccaagactcataaggatgctatcatatatgttctcatattggtttggaagagatgcttggcagtatcttttctaatcttaagattctatttttatttctgtaaatcagttcaaatgttaacttcttataattgccaattatggcttttatattcatcattattcatttgatattcatcatcagttaaaatttttctattaatcagtcaatgaaaaaattatcttttgcctcactcttcagtgaatctggctgtccttggttgtccatatttcctttcacttctttctatatacactataaaattaatgagacttttaaaaatctttcaattttagtcaataaatatttgaatgttgggccagatgcagtgggaggtacaaagaagatataacattgattacagtagctagtgtttatcaagtgattactggcattttacatatatggactcatttgtttctcacaataatgctatatggtaggtactattttcccattttatagatgagaatcctgaggcacagaaagattaattaattttccaagatcatattgctcttagatggaagaacacaagcaatctaacctaaaatctgaaggtgtaaccattaagcattactgcctcttgatgaataaatttaataagataccatctcttgccttcaaagatgattccacctggtagaattacatgtatttattattcactggataaggctgttcttaattttacttgttgtaaaaatttattctttcaaacttgtctgcattgttatcacttgatagtgttctggcactggccaaacaaaaatccatgtttatctaatttacaccacttatgatattctaaacttgctgtgtaactatatatgtctagtttgaactcaaggtgatatgattgtatctccatgattatgttaattatccttccctgagacttctccatttaccttttgcttttgtggaaatcacaacagcatacaataatccaatgacaaatagaccttttgatttggatatagccatcgttcccacgtattaaatgcatactacatgcagaatgtctaggaggaagtagaagatacatacacccaacaaaagataccatgttagaagtacaaataaagcgatgttggacaaatgaagtgaaattagtagtcacagaaatgagattcaccaatatgcctttctgagcatcttcgttggtatttgttttggagtggtcattatgttggtaatctcacagtaggcaggtaataagttacagtgattcttcccaatcttgcctgaacagactcctcctgtaaacacagctgaaaccctagaaagtataatttagaaaagcaatttttaaattttaatatgcatcagattaaactgaaagatgaggtaaaacaccaattgatgggccccagccccagggtttccgattcagtagatgtgaggtcagtttcaagagtttgcatttgcactttgaaagagctggaataatactaagaatatgcataactcctgggtgtgcattagaatcacctgtgattctggtcacaaaaacaatcaccaaacttctaaataaagacccaaagctcttctaatattaaaccctgagataaatatgagctgtatatatactttaaaaagatgaataaaataagtaaaggaatcatttacccaatttttgatgaatacgtgagtggcagcagttgcggtggtaagttaaatcaggaataaatgtttgcaaagtgaaaattgtaagaagcatctcctcttaccatgcagtttataaacaatcacaaatagggcaggcttgctgagctccttcatacctggcgggttattgtcatgaatttgtatgattattgtgtactttacaaatttttgttttacaataatttgtatttattcattcattcattttccaacccatttattccagctcagccgtgaggatggctggagcctatcccagctgcttagggtccaaggtagtaaccagcctgggacaggatgtgatctcatcacagggaacacacacacacacacacacacacacactcacactcagtcagattgggaccatttagacacaccagtgaacctcacgtgcacagctttgagaggggggaagaaactggagttccagagaaaacccacacagacatggggagaacatgcaaactccacacagacgttggccctggcaggaaattgattttttttcttcatgaacataatgaaatgctgttaaataaaatgatgtcgttcaaggacttgctgtaattaattgaggcttttagtatctccttttccaattatgttttccaattaccaaacattgctcatcacataatagatgctcaagtaatgtttgttaaacaaatgaatatctcttacgataaaaaatattgcaccaggtgggttgactgaccagatatttctaaccatgctggaatgacttatttctgacaaaaattattaattttattgatccaaaaggagccatgtaaaattgttttcctcttcttgcttgctattttcaatttttccaatttgggctcagctagcagtgccacagctgaaaaaagtgcatggattttaataaggactcctattgctgagaaggataataagtgagtctggagggcagggtcatactctcaaagcctttctgatgggagccaagattaaaatgcacagcaggctgagagggctgggaagaagctatgatttctcactgtggatttcctcagagtgccattagtgtaccaaggagaacacaggggagattgcatttacatgaggaaagcaagttagagttcagtgatcttgaattttttggcattatttcaattatttgttggaataatttaactttggcccaaaacatgtgtcttagtattgtatagatttgcagggcacagaatatttctggttttcccctaatgattgtcatggaatgcccttaaatttaatgaataagtgaatcccaagacaatggtatagaggtctctaattccaaacagtaatgtatttttgtgaaataaacaaggctcagtatttccattcgattcggtggcattgatggaatctgagcacattgggcacttcacaacacagtcatattcttattcaatcttcattagaaattcatgagataatcattgtgctattaacctcattatataggtgaggaaactaagtcactaaaagtttaaatgactggtccacatgaaaacagctgatgagtgatgagggctgtcaagacatctcaggttttttcttccctggctcaatgctgctctacccagcacctctgtggacaggaactccttttatcccccactcatttgatgagaagtatatgaggccagggaaaggcaagtgacatggccaagggcaaagggcaaggcattgtgagagtctgttcgggaatcacatctgaatctaaggagaaatccacatcgcctgccatcctaaagagatttcttagttgctccccctcctcattgggtctgtggtgtatttgtgaacaacagctgcatttgcaagtagccaggacttcctccagatgacatattgcgctgccagagtggagacaagcggggctgacttcacaggccaaagagggcatctgcatttgccactcagccccaattattcgaatctgctcatggcaggaggaatggtgggtcccttaggcacagaggccagcctctgatctccagactctctcatttctcctagatccgccccctcatgttgcttaagcaaaagcagggctaacccccgccccttggacaaggggcacatcattcctgcattccccaagcactctctggctgctgtatcagcaattggatgcttgcccaggctctgcaggactctagagtctagagcctgctggcccagaggcaagaggggtgccagatgtgcgagctagcaaaccgcggaagctactgtaagattagagtggcacagaaatagtcgggaaattaccctttccattgggcttggaatccagggtaactgaggcagcaaacaaacttctgtgtgtgtgaggtgtcccagtgtaccagtgtcctccattcgggggtgtcttcttcttggaaggaggactttttcttttaacccctaaagtgtcagggatctaaaagctggttggcaatacttgatgcctaaattgtggcctgggggtcacgatctcctgggtgctagttagaaatggggaatcccctggcccagtccagacctatggaatcaagatctgcattttaacaagatcccaaggtttatttgcatatttgagaaggcctgccctaaacaacactcatgagcctggggagaatcttaaaggcttgtgagacaacttgagggttgtgacacttcctaggtacttttgtagcctacactggtcctgtgtgattgggatctacgtctagcactgggtctgtggcgatactaacttccctgtctttcctggcccagactgacatttccaaagggctgcgtgaggtggtacatactcaggcaaggcattaacagtcacacaggcgctccagggctttctcctggcagtgcttgagccacgtggccctccatggagcacctatctctatcttggaccttttagttagaaagccaacagctgccctgcgtgggggaactgcacagtatgctaatgaaggagcagcatactgaaaatgatgttgtggctattaacatttttatgggtggactgctttgcaaagcatagggaaagtattactcttctaggattaatatatttaacaaaaagtctgccaggagaggaggtttttgctgataaatataattctgctgttgatttatttagtaatggagacttgaaattacaggaatcaatgtgtatatggaagccattgtcatttggttaattatgttttgccagcaggatggggaagcactttatgctcgatgcagccaaatgtatttcagccagaatcctgtgttataaatgacgaacacataaatgtagataaagagaaagacccctataattctagattcctggacacttgatcctccagaagcttgacatccctggccccctgcactggggctgtagcatgtagcataagtaggtctgcttcctctatagcaatactccttaacggggcttattttgcacccatgggatatttatagatgtctggagacattttgtttatcatagctgggcagggaagatgggcaacaagagagtagaggccaaggatgatgctgatgctaagtagacctacaaagcaaaagatggcccccacccccacccctaatgaagaattatttggctcaaagtatccatagttctaaggttgagaagccctattctagggcattcctatttgagattctgactcaaagaaatggggtgaagtccatattctctttgttgacaaataaagaaaataaggtgtgggcatcacatctggttatgtagtattatcttccaagatatccacccaggatggagtcaagatgagtgtatagtaggagagtctggaatagctctccaaccactgtcacttatctgaagaggtctaacactgtcaattggtcgccatcctattgtgaagatcatccccaaccttcctttccctacattctgatgaaccagctgtggtttggaaggcataaactttgctacagtcacagctgtgctatttactgagtgatcctgagagtggtaggcagtgtaatggccctcaaagttgctcacatcctaattcctggaagctgtgacctttcatggcgaaggggacttgcagatgtgatttagtcaaggatcttgaaaagggaagattcccctgaattttctgagggggtccttgtaagtagaagatgaagacaggggagtcagattcagagatttaaagatgcactgctgctgatcttgaagatggagtgaagctgaaggaaggagccatgagccaggcatgtgggaagttcctaggaaaaagaaaagacaaataatcagattcttccctagagcattcagatggaacacactcctgctgataccttgattttaacccccaaagactcattttatacttgtgatctccataactgtaagataaaagatgttagtggtaatttattacagcagcaatgggaaaccaatgcattaaggaaggcatttttccttttgaatgtcccactataaaatagggctttatccactataaaataggtgttgctcatttatttgttcctttattcattcaacaatcatttattgagtgcctactatgtgtccaccattctaggcacttgggagagagcagtggaccacagagaccaagcaactcctctaatctagtgacaggagactgataataaacttccaaaaaaatacagaaatctacagtgataaatgttatgaattcaagtgaagcagggtaaggcaaccggagtccacatctatttcttacaaatcattcagagcaggttctgtgataaggtgacatttagcaaaaacctcaaggaagtgggagagaaagtcatacagatattcaaaggaagaatatttttaatagaggaaatggcaagaatacattccctgagctaggagcttgattctgagattcaaagagcaagggaaccagtgttgataatgataataattacctcacaaggctggtatgagaattttgggcaacatacatgaaaccccctggtgaatttcaaaacactatgcaagtatttagtcatcattgcatggtccctcggagtgcattttgggggctgccaagggatgtgtagggtgacctttattttgtgtctatataaaagcgaaagggaaatagctattggcctcaggccatggaaattatgcacagaggcctagaaataggagtattttcccaacatggagctgatgattgatgatgattctatgtgtgtccttcacagtggcaaaccttcaaggggcagggacatcattgctgctgtagtccttaaaccctgtggtccagaagggtgctcccaaggtgccaaagggggcccagagcagtcggcttttctgtcatgggggcatacaaagagagaaatcatcaagaaattcaaagacctcaactcctgcctggccagggcccagagagaagcagttaggatagcctctgatacccagccttgccagcaactaatctgccagatgatgaaattgaaatatttgaaatataatccatacattctttttccaagacaggtggtgaaatggtctagtttttacaaaaggctgagaaaattaaaatactaaaatgttgcacatctttgtgtttgggagtaggacttcccctggaagctggggtggggattagagaaggcttcccctggaagctggggtggggattagagaagacacctctcagaatctagagctggcccattaacaccttaggtttaaggagctttctcagcccattttgtatttctaatcttaaaatgaccaaggcaaggtcacagataatatgtgtatttcatccttctttatgctgaagaatccgcttgtaactgaaaggtattttgtatattaattggattatcaggttagattctttttcctaaatgagtttctttaggccgtttctgcttgcttttaaaaaactttagttttaattttagatttaaatggtacaggtagaggtttattatatggatacattgcgcgatacggagatttgggcttctgatgatcctgttacccaagtagtgaatacagaaccctgtaggtagtttttcaagccttggcccccttcctccctcctccgttttggttgacagagtctgcagtgtctaatgtccccatctttgtgtgtgtgtggacccaatgttcagctcctgcttgtaagtgagaatatgcagtatttagttttccatttctgtagtaattcacttaggataatggcctctagcttcatccgtattgttgcaaagaaccttatttcattgtttaaaatggctgcatggtattccatggtgtgtatgtgacacattttctttgtctaatccactgttgatgggcacctgggtggattccatgtctttgtgagtaatgctgtgatgaacatactagtgcaggtgtctcttggtatatactcagtaataggattgccagctgaatggtatttcacttttagttctttcagaaatctccaaactgcttttctttctttctttctttctttctttctttctttctttctttctttctttctttctttctttctttctttctttccttctttctttctttctttctttccttctttctttcttttaattatactttaagttctgggatacttgtacagaatgtgcaggtttgttacataggtatacatgggccatgatggtttgctgcacccatcaacctgtcacctacattaggtgtttctcctaatagtatccctcccctatccccctgcttcctaacaggccctagtgtgtgatgttcccctccctgtgtccatgtgttctcattgttcaactcccatttatgagtgagaacatgtggtgtttggttttccgttcctgtgttagtttgctgagaatgatggtttccagctttatccatgtccctgcagaggacatgaactcatcctttttaatggctgcatagtattccatggagtatatgtgccacattttctttatccagtctatcattgatgagcgtttgggttggttccaggtctttgctattgtgaatagtgctgcaataaacatacgtgtgtatgtgtctttatagtagaataatgtataatcctttggtaatataaccagtaatgggattgctgggtaaaatggtatttctggttctagattcttgaggaatcaccaaactgtcttccacaatggttgaactaatttacactcccaccaacagtgtaaaagcattcgtatttctccacatcctctccagcatctgttgtttcctgactttttaatgatcgccattctaacggcatgagatggtatctcattgtggttttgatttgcatttctcttaatgaccagtgatcatgagcttttttttcatatgtttgttggctgcataaatgtcttcttttgagaagtgtctgttcatatcctttgcccactttttgatgttttttttttcttgtaaatttgtttaagtttcttgtagattctggatattagccctttgtcagatggatagattgcagaaattttctcccattctgtaggttgcctgttcacagtgactgaactgatttgcattcccaccaacagtgtataagctttcccttttctctgcaacctcactaatatctgttttttttaattttttatagtagccattctgattggtatgagatggtgtctcattgtagttttgatttgcatctctgatgattagcaatgttgagcttttttcatatatttgttggccacttgtatgtcttgttttgagaagtgtctgttcagtttctttgcccactttttaatggggttatttgtggtttttttcttgttgacttaagttaatcttatagattctggatattagccctttgtcagatgcatagatgtaaatattttctctcattttgtaggtcgtctgtttactctgttgatcttttcttttgctgtgcagaagcccgtccgtttaattcagtcccgtttgtctatttttaattttgttgcatttgctttggggatcttcatcataacttatttgcctagtccaatgtctagcagagtatttattaggttttcttctagttgttctctatttttttgataaaataaatgcctacattttgcagaactgaaatattaatgtgtacatgttattgtctgagtaaactttgtttttttagactcatagtaacaaaaggaaaatagacatctttagcaactctttcagtaacagaacatcttttgtataacctgaacttttatgtcagttcaggaatataagaggaaaagaaaggaaggcttggcaagataggtagctccctatcaggagaaacgaaaatgaaaagaccgtcggatcagtgtatactctgagttctgtgggagctgagtctgtatcctagaaagcatggaaaagtagtctagggcagaaataaaccaggcatgctgccaggatgaacaactagaaaaaccctttggaaccatggtctgtcaaatgctgatgtgcaggcagcttcctctgtccccaaggtcagaagaaattcctatatcgctacttctttcttctcctcaacatctgaagcaaaaccctacagagtacaaaggtaaagtgaagacaaaacaagtccttctagcttcaaaatgctttgatattctttgtcttttattttcataagacttgatagcatgttaatgccacagaatagcaggattcccttccattatatgataaacatgctagtgaaaaagaattataaaaaaaagttttaacagaggaattatggcaacctatgagaattgcttcaagtggaatatatattcatgtattcatcaaagagttgtggtatccactagatgtcaggcattgagcaaaggattggacaaggggcaagtagggcaaggccctattctgggctcctggaattcataatataaatggcagcatagacaaatatgcaaatgaacaaatatgcagttgagttacaaattgtcaaaggtgttatgaaagaaacaaacatgatattctgctagagttatgactgacaggtaaagggtgagtacccaggaatggccttgctgagatttaatctgagagctgaatgatgagagggagccaagtacattgttataggtcagaaacagaaacaatttttactctggctcttctgggaagacatgaaagcctgtgtttacaaaaggagattttgacttacctagtcacatgatctaaagaaacgcttttactcttattcttctaaagcgacatttcctggtcccccaccctcctgaccacatttcatattctttttccctgcattatttttttctccccaggtattataaatatatgacatactttttcatttactaatttgcctggtttaatgtctgtctccaccactagaatgtaaactctataaggaacttgtttcatccattttgttcatgatggctgtctctactgcttagaagagtaaccggcacatagtagatactcaatgaatatgattcctgctatactaagctatttctttttgcccctggagagggagatatggaattttgaaaactgccaggtctggaagaatatgctatactttccaaggttgttagatttgaatgagaaaaatatacactaaagtgagttccatgctggtgtatagtaaaggctgagtaaatatcattcttgggtacttccctgtctcttttttcctaagcacactcagtgaggtgggagctgtgaaacgttatgaggtaggagaaggtgatgtctaatgtttctctactgccctgttggcgccccccaaccaagtatctctcagtgcctttgcccagccttcctctgcacacactacagctagctctatcatttcctcatgccccatcaagtcctacctgtcttcgcagaccctcaggttccttggctgtggcttacaagggacatctgattaatctgtaaccaattcatgttgatcccctagctgattgcctctttgtcaccatgaggccagctccttaccatgtgtgggtgcagcaagcaggtacaccatcaccctgcttgtgggatcaggctccttctcccccggacagtgatgaggagacactgtcttcatttgcctctttacctttcccattttaaagctgttgactaacttcaaaaagaatctttttgaattccttttactcatagaaagcagaacaatggaatagtaaggaagaaaagagaaatcaaggctgcagaagagaagacagaggcacagggagagcacagagtagagagtaaggggtaagagaagagaagacaggagaaaagagaatgaataaaagaacaagagagaagagaagcagtgggtaaacagcctgttagatggtggcatagcttttacccactgaaaagatgttcacagcaaggtctatcaaaaccctaccacagtatagcagctctaccttgaaatagtatttctaatgataaaaataataacacaataaagtttagtaaacagtatgctaagagctttgcatatgttttctcctccatgatccttttgattgaaggcaaattttgtcatcctatgctcaaaattcttcagtcacctctcatcttactctgagtaaaaggatggggatctgctccccaccctttcttccaagtaggacccgttcctcagccccagctcagacagtatgcccctcccactctctctcttgctccctccattccacacacactggtctccttgctatttttgatcaaaccaattgtccttcctcagggcctttgcactggctattgttttgcctggaagagtcttctcttagatgtcctcctgactctctcccttacatcctgtgggggacttcttcctttgcttcttaagcaaaagtctcccatggccaccccctataaaatgtcagcccccactaccatctcttcctcctgctagctactcccccactttgctttaattttctccatactacttatcaccaccaggggtataatgttattttatgtcaattgtttgtcttttgcctccagattatgagtacagggattatgtcagctttcttcttgattcatacatcgtcggcacttacgcctcgaaggtggatactgtttttccttccgtagtagaggggaaaaagtaagctcacaccaggtaagtaaattttccaaggtcacagacaggaggtggtgaagccaggtttccaacagagctgtgtccatgtccaaggcccatgctttcaaccactgtgctagaggattccccaacggctttccacactgttaggacacctgtccgaaagggtaggttggcatttcaggagatgcctttctgtgctcagtcaagatcaatgcagatgtaattgtgtaaagcaagacaggactataaggcagatataactgcgtaaagcaaaacatagacttataaggcaaggttggtacaaatgcacatggctaaagcttgacctgtacgatttactttggctgcaatgcacagctacagaggcagtggggtatggtgtgtggtggttaaggacatacgttttgtgagatagatgtggcttccaattcctacggtgccactacttagttttgagaccttggccaagttacataatgctcctgagcacccagttccttctacatgaaatggggctggataaatggaaataatgcctacccttagagttgacttaaaaattaaataagggaatgtatacactgttcttagcatagtccctggctcatgtaaatattcaataaacactaaataaattactattattataattattatgacgtttacttagtatatagacgtagagaaagttttagttgaaattgtatctgttaatacattattattttctgttaagaatgaacatctacatttggaaatagaacaaaaaaagagcttactgcatatcctttcactgtcatgccacagcattgtctaatgagccgtcctaagggtcatctcactctgtcagacaatgtaattttgtttggcttaaaattaccactgattacagtctagcctctgcaaagttgatgttagcatgtagaaaattaataagatgcaaatcactgctgtccaatagagaggcaaatgatttctaacaatagagaataaaacagtagagaataaaatgttaggattttattgccctttagactattaagcagttttggatatatgacttaaaaacgttattccagcagtcttttccccatccatccattcatccacccacccacttacttacctacttacctatctcagtttcttgcattctccttgaatccactttattattttgttggttcctttattaatgattttaatatatctttgatacatccccctatgtatttgtatgagaataagtttatatatatatataccaaaatacaatacaatacttacataatatagatgtactcctagaaagcaattgatggtatctaagctatttaatcttggcaaaccctatcagatacctagtttctgtgctgctactcctgatgatattgactccttataagttttactgtacttttgcttactaaatatcagaaaggtataacatagtgtttaagatcagtggctctggagtcaaacttcctgggttcaagctcttgctctatctatcactaattagctctatgatcttggaaagttgcttaacctaccaacaaaatgaggccatatgaatacctcttatctcagagaatattttgaggagtaaatgcaataatgtatataaaagtgcttagcatggtgcctggtccatggtgtttaataagtattggttattatgatttatgattgatcttcattttggaacttaataaagaaaatgaaactttgcaattctattgtgaatgtttgattttaatacttcctcagcaaactccggtagtaattgcataatacgacaactgtttttcgtagaagcctaccaactagaagttctgaaagcaagtgtttaccatgaaaggtgtttaactcttagagagccctacaaattaaaatagcctacacagaatacaactgaaaaatggcctctactgtttattttctaactttctacactatggtacagagataacttattgtttagtagtgactggtctagtctgttttattgacttgtgcactttctgaccctgtctaatttagtgtcagagatcacctgtgatttttgtatatttccgaatgtgtaagtatctttcccagtaacttgtacattctgatttcctttgcacatgagaattgatgtggaaaaggcagctgagcagaggttggcaacctttctgaagtgctatgccaacttcccatttattcactctaatttaaggttttccatgccaggatgaacctcctatcatccaaaccactggagactgagaacttccaagacagagcaaggctacagaaattgaaattttcattgtatgatagattttccaactttttttctttcctgaaaaccaagaactttgaaaatgctgatgccaattttatgcaacccagacagaacgatcatatatgtagggaaggggttggtgaagattgcagttccaaaacctcctgaagcttttcatacaacatttattcattcatgcatgcatgcctatatatatatatatgcattgtgcattcatttagtaattcattcattaaatcaatgttgagcgtctaacaatgtgccagccactctggttatgtatttacatatacaatacttaacttttttgactaagtgagagaacatacttcatgcacgtagcagagtgcctggctcatagtacatactcagtaatgaaaaccattagttttaatcttctgtttaaaattttacaaaagtaataaatgtacatagtaaagaatctaatagtgcagaagagttgaaataaaaagcagcaattccccatgctgcttctgttttctcccaatcatattctccagagccttaattttaaaaaaatcagttcttctgatatttacatatgtaacattaaataatgcaagtaccagtggtgtgtatcctcccctagactctcatagggaaattctctgcttgttcagcctaggttcaccttggccaggggtagagttccctcttatcacttttctaatgagattcttaaaagtgtccatgactgttgaacaccagacttgttgtctaggggaataaattggcgtggaggagaccactctggaggacagctcatcttctaagtcctttttgcatgcactgctttccagacctgtgtggaaggcaatatccttttcatcccttcagaatttcttctctcttcttgttgcctcttgcttttcttacatgtttctctgtgttctgggctttccaagaaaaaacaccctgaaagcctcttagtctggctttttgaatttttgttttcccccttggtaaggactgggggtggtatggcaagaggaaaatgacccaaaagatttggagggaaatgcgcagaaaacagctagattaatatttcaagatagaaccatcctgatatattttcttattttactattctttgatttatcaacttcagacattatttattgactcctctctataaaaaaggaggatttatctcatgcttctttctatctgctcctctccttcccaaagttggatcattatgttagcattttggttcttctgttgtttctctttctaggtttaaataacaaacttagatctctttgcatcaccttgaggcagtgtctcttgtctgtccagcaagatgagggtatttgctcccctatgcttttctcccctttttcattgtcaaggttgctagtgttctattctatagatgtatttaaagtttctaagttttatatatagatagcttgactataaaagttgaaaaatggtatacaagatttattttataatgtcgcttagaaaaatttgaaaattgactgtgtattagaaattattcactcaaatgcattattcatgtaacatttctgttggttttttttcaacataaaaatttcaagagaaaacctagctcatttcaaaatccagattttaaaaaggttatttttgatttttattttttaaagcaacggggtctccctatgttgcccaggctggtcttgaactcctgggcttgagtgatctttccttctgagcctcctgagtagctaagatgacaggcgcacatcactgtccctagcacaaaatccaaattttcaaacaagttttaaataggtaaactttatcatgcttttatctccctcacaagatttactaagcattgggttcaaaaagaaatatttaagctttaatttttaaaggaataactactgacagttaataatattaagaaaaagaacatgaaaatgtcttttgaatgacacattttaaaaacattagtttgaatccgatttcttcagttcaagtgcaattaatagtctaataaaagaatcatcaataagatgggtaaatgtgtgaatcatgtcttagatttttaaactaagacaagttgaaaataaacacattttctggcttcatagataagccttgtgttatatcaactctgtgacatagattaaaattacaataatggattaaaagtattattttatctcatctaagacatgtaatattagtactgtaatgtcttttagtacttacactaatatatgggctgacagtggtgaaacaaatactaggttcctgaagctttcctaagcattataattctgatatatgatcatattattttcaacaccacatctcaattttctgacacattttttacttttataattctaggatttgcagcatcacattcttctctaactccttgcttatgtgactaagaaaagtgtttaactaagtacaaaagttcagagtgtaacttagtgttaagaagtaagccagattttgtcccagatcttacatactaatcagctttcactgagagattaatttactagaatttcttttgagtgtgcgtgtctccattcatacaaagattcggctacatttttcttttttgtgtattagctttgtcaagtttggcattaggcttatgctggttttataaaatgaataactttctatctttttgttcagcctgggaacaaattatgtagcatagtcattttttgaagatttcaaagaacgtttttcaaagaaatgtgtgggcctaaatatccttttggaaatatttcatttataacattttcaaacattttcataattatctatattgttttaaactccttcctgagtcagttttaaacacttgcacattcccagaaaattctctttttatctaaattttcaatttttttagtataaagactatatggagatctgtgatatactttaaaactactataacttttttttataacttctaacttgttttgtgctttctttttttgtctttgttagagtctccatgtttgcccattttgttcgtttttctgacagcctagctgttgaatttatttgtccactttagaattaaaatattgccaaatttattcttataattaaaattttttcagagtttatgagaagtaggataatcatatatcccagttgcctggcatattctggtatatgccttctatcccaacgtaattattagtagtactctctttcctccccaaaatacatcagttgggtaataaattatgtggccactctaatgataagtgaaacatacattttcctctcaatacaatagcaggctataattacaatgcataattataattacagatattgtctcatcccctgggatgtgaaaattcatgttgaggaggttggggtgggggaaggtcaaaaggcttttgatattataaatgtttgtggccatccgaagggccatagtacctaagtagataacgagtttaactgcagtatcaaatttcatgtgggagggggtataagtaggataaaattgtcttaaccaggctccttagagggacaataatgaaaaaagaaaaggttgagaaaaatgttataatgctgtttgaataccaccattgattagttcattttatttttctccttaatagtcatttggtgttttctaatttgtaagtaaatatagtttctgtttaaacaataagttattgtttcaacactgaaatacccttgttgacatcatcagtggtcaacattgtcaacacattgttctgtgtttttggctgactctgcttttcaataccgtctgtccaacttgactatttcctccttttttttttttattgagaatattattgggctcataggattaaatgaaataagatagtaaggcattcagaactgtgcctgtccctcctgctttccctctgtctcactggttattttcaaactttttggtttccttttttttttttttttttttttacctccggccaatctctaattgctggagtgctaaagagcttgagctctttttcttctctatctgcattttattcctgaatgacctaatctaattacattgctttaactccttctgtataactttatacctccagccctgactcgtaccatgagcctctgacttgtatattccattacctgcttgatatttccatgtggatgtataataattatcagaattaggtacaggctcaaaactgaatttttttcttcacatctgttctacattcctcctcgttcctataaatggtattgccattcactcagtttcttaagtcaaaaacctaagatgcattctagacatttctctgtctgccttcctccacattccatctgccatcatgccagctggttatatcaccaaacctgtccacttctcttgattttccttgttactctaatccaagacaccatctgctgtcacctacattctccactggtctcctgcttccactctcatcttccagccctcaccctcatcatccattctccaaagagatctcttaaatatacaactagaattactccactccccttcttaaattctttattgggctttcactgcagtcagaataaacactgaactctgtatcatggccaataaagaaccatgctcccatctcctctccagccaccctggccttctattcccttaacatgcctaaccagtttctgtcatgggcttgcttgctgtttcctctccctgtacgttcttcgggcccacgcgtttctgtggctggccattcttgtctgagcagtctcagctcagttgccaccccttcagagaggcttccaacctggcaccataactaatgtcagctcctttctaccaatgattattgagttgccctgcccaacttttttttttgtcaaatcattgttcgtttgttttgaactggagtgtttattgcagaaatttggccaaggttccaattgagtgactccagctgaggttagactggggccccttgcccagggctgggcacctgagacaggaaacagtgaagggatctgggcctcagagctgtgagatagaactggggaccaggctgcaggtgaggcctgtatggtcaggttcatgcaaggccttcaccacaccatcctctatcaccaggaagaacctctcaagctctcatcctcaaagagtggcaacagcaaatcatctagtaacaaatcagtctccttcccagaggccccagggctgccacccatgagctggccttggccttctgcactgtggcctgtccccactcaccagtcacaaagacacaaagacagtggcacttaaacatggatctggcccccctttaccttcagaaccccagcctactccccaaacccaagcaggtgggtctttgacagttggggtgaaagccccagggattctaaacagcacacccttctttccctggcatagttctgtcaggtccaccttgttcccaggctccctttcaaacaccactaatgccaggatagcatctcccaccatgacaggtgccatggctgcaaagttactgctgaaatcgtgggtccccaagcatccactctccttctctttctagtagtcacgctgctcctgctgctgctgttgctaccactgctcctgctgctatgattctatcatagcagccccagtgaggaccaacccagttcaatgtttcagggcgcacagttgtgccagctccaggctgggccctgtggctgcgacagtcctgtctctgtggttaggcaccacctatcctattcagccttcttagggttatcttagtatttggtatagctccttcttttctgttgtcctcccagcgctatcatgtcagttccgtgaaaaaagagacctgtttcttcattcacaatgcacatgttctcagtacctggaacagctcctgtcccacagtaggtatttgtgtgtatattttatgtaatagatttttggcttaattctcatggagtcaaatgatgaatgtgaaattcttaaatgctgaaggtttgctgtatttagaagtttttgttgactgatgggttggttggttggctttaaagtgaagtaatccatcaggttttatgtatgtgaacttttatggaatttggtgaagtgtgtgcctgtgtagattagtatataggagagaagtttttatttcttttcagatgattagttatgctttgccagtatttcctcagaacttctaagagtgttggtttggggggatgtattcagtattgacaattccacgtttatctacattcagctgtcaggttggttatttaaccattccgaggcttttcttttctattatggtcacttaaaacaaagtaaagcaaaatgaaactagactgttttggtaagcttttattgaaataagaggggaaaatgtaaggggtaaaaattgctaaattatttgaaattatttttggatgcagaggttgactttattgactgaaacagaatttaagtccttagcatcttatctggatgttaagaattgcctatcttttggttgtttccagaacaatcatgtaggttcctttttgcttagactgaaaatgatttgggatgaagtaaaaaattcactccctcacaatggattaattttttttctcagtggagatgccatgcggtcagaatttcttgaaaatgacccacaagcttattactaagcagctttgggccaatgagcagtcttttaaagaaaacattttatttatttttctaattggagaataatctatgttcattgtaaagaaagaaaatagaaattatgtatattcctaccaaagacaatttccattttagtgtatttcctttcagttctttttctgatatactatcttttctcttctgctttgagatgtgcattgtgacttccctttgtgataaagaggataaatctgctggctcatttccttttatagactgccaccttctctaccaacgaagaaaatgtgcattttggattttgcttgagttgaaacaatttatgctggaacaattataaaaagtagcatctgtaatgtgaatttggcccactctgtatcagaaaaaaataacttccaccatagcccgagaggaaactttaggtatctatcaccgatagagccaatgcttttaatacatatttcatgatcacagctgaggcttttccaaactcagagtgctgtatcattcattcactcctttaaactacaagattatttttggctctttgtgttggcacataggcctttccattgctgatctgcatgaaccatttatcaagtcaagggtttaatctatcaaagtcagagtttcttttttctgcctgtctctgtctcgctttcccagatggtattgtctcatatgtgtacactgttggcttaaaaaaggctatttggaatgcaaaggtttatcaagtttctccattttttttcaaaataatatattatggagcaaagtgatattttataggcaataataattatagtgttgatcaggttctaaaacattacattaactataatgtcccaaacctccttcttggctaatattctggttccgttcttgccagtagctcctattttctctactcactcattctgaaaacttgaatcatctttgattttcctctctcccctttccaaacatttattgaattgtcaaattatttggattgtatctcctggatatttcttgaatccatcctccattgcctttgtgtactggactcatgatgttgcctgttgtcttcaaagaagcaggcaattcattttgaatgcttttgatcggatccaaatataaaggccaaaacaaattaagtaatttatttaataacactgactccttgccgcatgccaacccccgatctagactctggtgatatagcaatgaacagtagggttaaaaaaaaaaaaaaaaaagcctaatagaatttacatgccagtgcaggaacaggggagaaagggacaaaaataacactagtaagtaaattataggatgttggatttgttaatgttgttatgaggaaaagtaaagggatgaaaggctgcagtgagacctagggtggacagggaagggttagagttaaatcaggtggtagggatgataatgaaagttaactaaaacttaaacaggcatcataaacaaagagaatacatcaaaaagcattctaattatgtcagctagtgtcctgaatcccccagtcctgatacctaggatacatagataatgcacagggatcttcggtgcctgagcataacgcaatgagaactattataatagccaccaagctgttctccctctctttgagccattcccttcccaggtcagcactttcagcaaaaccgtattgcggtctaaacataagaattgtgcttaggagaaagtgctaaagttgattcaaagaggcatgtccacaataggtaacccaaggtacgcaagaagaaattccaggggccacagtaagactcaaatcaaaatcaagaataatatttagtgaattcttactgtcaaatgaaaaagtctaaagtctttagcctaatattcatggctctccagaaaatagcttaatgctagttttcttttttcttttctttttctttttttttttttttcatttttgagaccgagtcttactctgttacccaggctggagtgcagtggcataatctcaactcactgcaacctccgcctcctgggttcaagtgattctcataattcagcctcccaagtatctggatttacaggcatacaccaccatgcccagctacttttttgtatttttagtagagacagggttttgccgtgttggccaggctggtctcaaactcctgaccccaggtgatcaacccgccttggcctccaaaagaccatgctggttttccaaccttatttcctagcactcatcttcacatccttccacatgtcttccaatttccttccttgttgtctttatttggatggaagatcttctaccacatttttaggttccaaattctatccttccagtgggactcagatcagatgtttcctcttgtatgaaagcttgacagaaatcatcacctcctctttagaatgttaataacaaactcttttctggcatctggtattatatttactatatgtgtgtgcctcaacatttctgttagactaaagctctttgagggtagccatctggtccggctgttctttgatcctttccccttggcccacacagtgttcagcacagatgagggaatgataacaaagtgctcagtggtattttcaatggcctagtttttcaatggcaattcaaaaatattgttgcactggagtgcctccagatgaaggtcctagaaatggtaaaatgtcatgaaatacctaatcagtcaaagacagggaatgtttagcttggagaagagaaaagtaataataggcaaattttttcagtattcagccccctacctgcctccctgccaacatactacacctttttcattatttttattaactgaccttctggctatattcatcagtgctcaccacttctttttttaaaaaaccattttctcccctcagtgcatagggtatgtctcgaatctctccatctcttttgctggcttttttgcccctatcgaatctttaaatgttagaatctaagctcagtcttagatgccctattctcagttctgattaatcgatgcttgtggcttcaattttaacctacatggtggagattcacaaaagcatacattcaacccaggcaagatgtcagaacttccaactaccaactcaacatctctctgaaaatgcttcagaggacccaacatgtacatatggaactcacgaaacctttccacactttctaattttaatgaatgactttgcagccttccctgtattaagtcaaaattctggaagtcacccttgacagcttcttctcccttactccttataaaaaatccatttccaagcctctagtttttacctcctaatgtatctaaaatctacttagagatagatcatttcctcatataggacaccattgtcccttgcttacctagatttctgcaaaaactaggctacccccatccacatttgcctcctccactctgttcttcactcctctacagttaccatggtgattttttgaaatgcagattttattgccttatttccctgggtaagagtctccgggattcttctgtgccatctctaaactcctctgaatatggcccacaggtctctgcttcatctggacctccctgccactccaacctcatctcataccatgttgctcttatcttcctttggttcatccttcaaacatagaggacaaactgcgtcttctgtctgggatgctcttctcttctgtttccacctatttagatcttttacctcttagatcaatcatcattcccttgaagaagcaccttctgatcttcctgaatagatcaaatccactattagagtctgtactggcatcaggttattaaaatacatattgcaattgtaattttacatttattgctgagtatttctgagagtagggtaggaagaaggagagctgcaagacatgaaacaagagaggacctagggaccagaatatgaagcacttagtaaaccatgttaagacattttggatattatcctgaagacagtggggaaccattttaagaggaaatgacaggatcctattaacatttaaaaaatatagtggttgaattatgtccctccataatttttatgttgaagtatcaatccttttacctcaggatgtgaacttatttggaaattaggttattgcagatgtaagatgtagtaggatgagtaagattagtaagatgaggtcatactgtagcagagtgagcccctaaaccaataagacttgtgtccttatttttaaaaatatcatgcggaaagatagaaattcacacaggaagaatgctatgtgaagactggggttatgtttccacagatcacggaactaccagaagttagcagagaggcctggaatagattcttccctagtaccttcagaggtagcatagttctgccaacacattgatctcaaactatagattccagaactgggagacaatagaatgcagttatttaagccactcagtttctaatactttgttacagcagccctagaaaactgatatagtaaggataattctggctgcagtgtagagaatgttttggaagtgggtaaaactgaatatggtgagacaatttgaggctactaatataagagatgacagcagctgtggaaaagattagagaactaatttgcaagtagaatcaatgaagataggtgaatgattagacttacagagtggagagaagaatggcttgagaaatgatggaggattttaaatcccatttattgagtgatgactcccaaacatacatctttagctaagacttctcttcagtcttccagattcttatatccaaatgccagttaagctacacttggtttttccacagtcgctttgatgaatgtttaaagaaagaaattggtaactaatagttaataagagctaccatatagattacaaaggagaattaatgtattatttatctgaataactgtatgttaaaggaagataaactttcattctacctgggaaagagcttttaatcaaccatagctcccaggaatagaatggaatagaaaacctacccttgtgaggtagacttctgtctctgattacttcatgcagggtctaaatgtccataagtctacaacttcagcctgtttatccttctttttttcattcacatggttctttgtttacagctctcatgttgttctctttacattcaggttatatagaggcctgtgatagtcctcatatgatggtaaggtttctcacagcaaagaccaagctttgttaattttgtcagcatatggtgcctaacactaagctgtatacctaaccagttaataactgctgctttgttgagaatgaaaaagtttaggccccaatttcaaatattttctaccccaactatgttatgcaatatattaatactaaatatgccagtctattttcttgcttagtaataaaaatacaacgtgttgagataaaatatttctggtagctaatcaatattccagttctcaattatccatgctagattatattatgcattaatttgattgcatgctctgcagtatattgtgtatgtgttgtgcaaaggcataattgctcatgttcatacataataagtaggtttgggaatttgtctggaggtatatcttagttattaatagtgattgtcaagtgcacatttcaagtttagaacctcgttggccttctgggagtcagagtctcaatttcaaggaaaatttaaacctttcctttcatgtattcctgttcacttaatcctgtcaaaatagaagattttgtgtctaagaagaaagagctagaggctaattaaaggagtgaaggccagggtttcatggacctctgatttctctccaaatgagtgatgaattaaatgtaaataagtcagaaacataccttaggttttgcttttttttttaattgttataaaaaattaatgtaaaatttagcatcttaaccattcttaagtgtacagttcagtagtatgaagcatatttgcattgttataaaatagatcttcagaagttttttcatcttgcagaactaaaactccatacacattaaacaactccccattcccctgtcccctcatttctctcttggtaactaccattctcctttctgtttttatgaaattgactactttagatgctgcactactgcatggaaccatgcagtactggtttttttggtgactggcttatttcattttatataatgttcttaaggatcattcatgttgtagcatgtgacttgatttccctcctatttcccatataatattccattttacatatataccacattttgtttaaccattcatctgtctataaacatgtgggttgcttccacttcttgactattgtgaatttcttttttaactaagtgtatttgaaaatatacagtttctgtatcagttccattttaaattttctctctatgaagatgaaggaagaatatttttatacacttgaaaacttaaaactctttgtcacttaagccttctgtattagtacattctcatactgctataaagaaatacctgaggcccaggcatggtggcttatgcctgtaatcccagcactttgggatgctgaagcaggtggatcacctgaggtcaggggtttgagaccagcctgtccaacttggtgaaatcccatctctactaaatatacaaaaattagcctggcatggggcacacgactgtaatcccagctactcgggaggctgaagcaggagaatcacttgaacccaggaggtgaaggttgcagtgcgctgagatcacgccactgcactccagcctgggcaacagagtgagactctgtatcaaaaaaaaaaaaaaaagagagaaagaaagatacctgagactgggtaatttataaagaaaagaggtttaattggctctgggttccataggctgtacaggaagcatgacactggcatctgctctgcttctgagaaggccccaggaactttacaataataatggaagacaaaaagggggatccagcacttcacatggccagagcaggaagaagagaggcggaagtgctacacatgtttaaacaaccggatctcttgacaactcactcattatcaccaagacaataccaagggggatggtgttaaactattcaggagaaactgctcccatggtgcaattacctcccaccagaccccatctgcaatatgagggattacagttcgatgtgagatttggtagggacgtagatccaaaccatatcattccacccctggcctcccaaatctcatgtccttttcacattgaaaaatacaaccatcctgtctcaacagtcccccaaagtcttaactcatttcagcattaactcaacagtccgaagtccaaagtctcatctgagacaaggctcatactttctgcctatgagcctgtgaaatcaaaaacaagttacttacttccaagatacaatggggttatagacattgggtaaatactcccattacaaaagggataaattggccaaaacaaagggctacaggccccaggcaagtcctaaacccaacagggcagtcattacattttaaagcttcaaagtaatctcctttgactccatgtctcacatctgggacacactgatgcaaggggtgggcccccaaggccttgggcagctctgtccatgtggctttgcagggttcagcccccatggctgctctcttgggccagtgctgagtgcctgcagcttttccaggtgcagggtgcaagctgtcagtagatctaccattctggggtctggaggacagtggctgtcttctcacagctcctctaggcagtgccccagcagggactctgaacatgggctccaactccacatctctcctccacattgccctggtaaaggttctccatgagggatctgctcctgcaacaggcttcttcctagacatccaggcttttcttttctaccacatggacaggctgcaaattttctaaacttttatgctgtgcttcccttttaaatataagttccagttttaggtaatttctttgctcacacatttgagcataggttgttattaacagctgggccacatatcgtacactttgctgtttagaaatttctcccactagatactgtaaatcatcactctcatgttcaaagttccacagatccctggagcaggggcacaatgcagccaggttctttgctaaggcattgcaaaaatgacatttactccagttcccaataagttcctcatttccatctgagaccttcttggcctggacttcattgttcacatcactatcagcacttttgttgaaaccattcaacaagtctatcggaagttccaaacattccctcatcttcctttcttcttctgagccctccaactgttccaatctctatccattacccagctctaaagttgtttcatattcaggtatctttatagcaatgccccattctgtattcattttatgtattagtcagttcttgtgctactataaagtaatacccgagactgggtaatttataaagaaaataggtttaattgatccacagttctacaggctatgcaggaagcatgatgctggcatctcctctgcttctggggaggcctcaggaaccttacaatcatggcggaaagcaaaaagggggagttggcacttcacatggctgaagcaggaagaagagagagaggagagaggtgctacacacttttaaacaaccagatctccttagaactcactcattttcaagaaaataccaagggggatggcattaaactattcatgataatcttccctcatgattcagtcacctcccaccagccccacctcccacattagggattacaattcaacatgagatttattggaaatacagacccaaagcaccttagcttcttattgtagattgttattctctgataaaaactggtaccaaatatttttagacagaataatattatgaaagtcagtacaaggaacgtataaaactctgaaaacagatattagatttgtttggcagattggtgaataggcaatggaagtgaatgactctttatctcctgaaggaccaaggaggctttgaagagaattactaagacacactcataccttttaaaaagtaactcttggtcaggcgcggtggctcatgcctataatcccagcactttgggaggctgaggtgggtggatcacctgaagtcaggagtttgagactagcctggccaacatggcaaaaaccccatctctactttaaaaaatacaaaagttagcagggtgtggtggcaggtgcctgtaatcccagctactcgagaggctgaggtagaagagtcacttgaacccaggaggtggaggttgcagtgagccgagatggtggcactgcactccagcctgggtgacagagcgagactccacctaaataaaataaaataaataaaataaaaaataattcttcaaaattcaatattttccaaacttattagaatctacaaggaactcaacaagaaaaaaaaacctcattaaaaagcaggcaaaagacatgaaaagacatttctcaaaagaagacatacaagtggccaagaaacatatgaaaaaatgctcaatatcactaattatgagagaaatgtaaactaaaaccacaatgaaatatcatttcataccagtcagaatgactgttaaaaagtcggaaaatgacaaatgttggaagatgtagataaaaagatatgcttatacactattggtgggaatgcaacttagttcaggcactatggaaagcaatttggagacttctcaaagaactaaaaatagcactaccatttgacccagcaatcccactattgggtatacagccaaaagaaaagaaattatatttaaaaaacacctgcattcatatatttatcacagcaccattcacaatagcaaagtcatgaaaacaacctaagtgttcatcaatagtggattggataaagaaaatgtggtacatatataccatggaatactacgcagccatagacaaaaaatgaaaccatgtactttgcagtaacatggatggagctggaggccattatcctaagtgaaatagttcagaaactgaaaatcaaatactgtgtattcttccttataagtgggagctaaacagtgggtacccatggacatatagaaggaaataatagacactggggactccaaaaggtggaaagtggttgggtgtgagggttgaaaaactacctcttgggtacagtgttcactatttgagtgatgggtacacaagaaacccaaactccaacattatgcaatatatccatgtaacaaacctgcacgtttacttcctgaatctaaaataaaataacatttcaaatttaacttcttttccacctttattaaaggtaaagctattacttttgttttaacactatagtgaatagaattttctgtgttgttttaaataattccgtgatctaagtatctgatgcagagatctttaccaatgaacatcaatggtttttccacaaaattaagatcttttctaagatgaatttacaagggctttgagtgtgtatgtaaaaataagtcctagaattcttttacaataatgacaagcatggcctttcaatttttcaacattctgaaaattgataaacaaagtcatttaccctgtctctaattttctgaagattagattcattagtttaactcatggttatagtttttgtgtcaaccgtattgatgtatacatcaataaacacaatctttcactttcactcactcttctgtctcctccatctccttccagttcctacattattcagaatccttggcaattcatatgtgttaggtgtgaagatatggaattgtcagcatcaggaaaagctattaccttgctacttcagactgagtctttctcttttctttgtttactttagatgatttcttttttttaaagactgagttcttgaattcttattctctgacttgcttcataatccatttcagaatttcttgctcctacactttgtttctttatgaatcagtctgtgcatgagatattccatttttaacccagcttaaatttctccaatgtacccttgttttgctttcaagacagttagcaactctgaattcaagcctatgatcttcttttagaaacctgatctgacagactcctgcaaaattctaccttttttcctggctcttaatttagctttgaaaatgaagtacatactatttatctggttatacattttaaagtagattctaagtgcaaaaaatgtgcctagtcaattcaagttgactcctgattttttgaaaaaacattaagaattgaataacaagaataagaataaatataaggctactgactgaaatgtgatctttctcttattttgaacatcttatttcacaaagttctaagtccttttctatttggcttgaccgcttccatatgatcatggatataaaacgattaaacagaaagttcacattcagcaaatatcaaggtgttcttaatatcgtaacttgaaatcaatgaagaagtcacattttctgctttgtaaaaactgcctcacatgtccctggtctggcaaaaaaatacacacacaagtactgaaaacagaagatgatagcaccagctaaatagcaccattgctaggcataagatttgaaagccagcactttgcagggaaaatttgagtaaacaacctctgtggaaatacagttaattaaatctcgattctataaactgtgaaccaaagtttatataaaagagagactaagaagtctttgttgtaagtattaaaaattctgacataaggaagtgaccactctagccatatcagtgtcagaaaatgacagtgtggggctccaaggctgagaatcagtggggctgcaaaatctggacaaagaaaggcagaacaagacatagactacagaaaagagaacattatctgagcaataccaggctaatcccttggtgtgaagaaaataggagttaataccaaaaacatatggctcattattcatgtaattatgcttgcaagctatatagtaaactatatgtgaaattttcataccatagtataaattcagtcattagtttttccttttcatatatacattaagtaaatatgtattgaggaccctcagatgtctcaggcatggacctataatggtgaaggattcagctttgccctcaaggatcttacaggaatggggcagatggcaaggaaagaaacaataccgtgtggtaagcacagggcactaggggaacaggaagtagtgatctatttatctggatccttgtgggcagaggaaataaacataactaagaacaatgaatgataagtttacaggagggtaggggagaagattccaagtagaagcattgtactaaattttgagtggggcaaaagttcagtgaaacttttatttttattataaacccaccaaagtaaaagttctcagcttacatattatagatagctctctgaactggatgaatgtcagctgtgatttcaatcaagcaatgatgatatggccagatggagtgtgccacctcccttcagcattttgtcttaagagggtttctaatatggcttgtcagacagtatgtgtattccgtgtgttgctggaaatttgaagctaccgtctagaaacaaaggtcttggtctcagcagcattcagtgagttggtgccccccagtaccttggataaaaaaatgtatcctataaagggctccatgaagcacaaatgtaaaaacatgctacaaaagcatctcttcttttcattgtgccacaggggctatcactgtgagtctgacttgcaaagtgcacagcaaagcgaacctgtggtctcactactttgctttatactattgcccactccagcacctgcataaggctgaaggatatccaccaagagaatgctcatcactttgccaactgccctctgtgctctagcccagggtgggcattttttttttctgtgaagaccagctggcaaatattctaggtttcatgtaccttacagtctctgtgacagctaatcaactctgccgtcgtagagaaaaccagcacaaaaccatctataggcaatagacaaatgaatgaatgtggctgtgtttcaatcaaactaaatttgcagaaacatgcagtggtcccaggccatagtttgctgatccctgctctcaacaatcctttaaggtgtggtatctggatcctagcatatgctgtttctgtttcatgaaacattcctccttcatctctctgcctagctagattttagtaattcttcagctattagcagaggttattttttgagggcagatgcctcactgatgccccaaatctgatggtatgccacttcctctccagagtactgactgatttctggttgtctggagacttgctctctgcacttcagagtatgagcttcctaagggtagaaatctgcttccctttctgcctgctgaatccctggcacctaacacacaatgcctgggacatagaagtgactaaatacatatttgtttaatgcttaacaaatgaaattacttacatcttccttactttgttaggatcataattctagcaggtgaaattatttatggtcttatagtttatgagccatgtcaccatgttatcacattgtaacaaagcaaaggtttaactatatctcggctccagtggcattcagagggctgtggaaatcaatagttttagcttcatttagctaagtggagaatgccatttgggcagtctgtgtctactaacaacttggtccacacccactgctctgctgtctcgaggtggagaataacacctctctgtccccatcagtgtcttccactctttttagaagtactgccagcacaatgctgtctatgctccaatgcttaacaaaatttttagtgaaatgttgcttacctttttgatatatcttattatcatcctagagcccagagaagtgcattagattaacatggaatcagaatccgatgtaaccagaataacttccctccaccaagactaatgctttgttactgggtctaaaatgttgggctcagttcttgggaagacttacttcccaggaagctcctctgtgtctcttaggctcacacttcaaggaggctgctcattaatttttcaacatgctcaggtatcactgtgaatcctggccagagcaagctggtaccttgactactcttttttcctcttccacttgcaggtagaacaacaactaataacaaatgtatatatgtagctcactatgtgccaggtattcaccatctgtaagtgatttaccagtagtaacttaattgaaccttgtggtgattctattgcattatctttatttcaccaaggaagaagctgaggcacagagatgttagttacattgcctaaagtcacacagctagtaatgatggagctaggaatataactcagacactctggttctgagtaaatgccctaaacccatgctgctggtgctgtgatagctgagtctcagcctcttcctttctcctacccctaaagaatatacagtcttcattctacccacttctctctcagaatctcagaaactaggaaaaaaggaggggtagaaaacacataacagtgcataacttatggtacagactgagacttgaggggaaatattcagagaccactttagatattaggcaatgctagctctataataagtagaaaattccaaattcaagatattctgagccttgaaaatcatgagggaaataaaaatgcccttgaatggctatgctgctttctctattcaaagagctagcttggaacactaaaaggatgttcttattcactaagtgtttttcactgtttgagtctgcagtggagttttagccacaaataaatgtttttcctaaaattgaaatcaatttgtaaaataatgtagaaaatataaagcctcttgctgtttttctcagtgataaagcagcaggaccgcagcaggaaccaaccatgaaaaatgtggccacctcgttgagctttgcactaggaagctacttcattttcacatacaaggattctccctattccgtgttgcaaataaaaattagtaaattagtagtactaagtttaatgaactctactgaactctgtgtgatacaggaactgacaactatgggtctgaagatattacatccctgttgctttgtgaaaattatctttactccagacttgatagaattagcgtaaacagataactcatccatctttcaatttaaagaccttccttttcctcccatctttttccttttcatcttcaatggttaattctcatttgaaaggatcattcccttcatagacatatccccggactaaaacatgctctttctaacctaaagaaatggtttcttcataaactcataggcattaacatatttttgtaaggtcaccaagagtgacttgttcggggtacctgaaagtcaatatggcgataaactgaagaatcagatttttcttcctgatttttctaagattattgtgggtaagatgaaccatcactttttgggccctagaaactgatttatatagagactagaaaatgttttacatagagaaactaatttatatgcagattagaaaatgtttttggagtttattttcccactagtaaagccaatttttttctatgtaatgaatccattcacctacccatctacccatcagtctacccattcacatgtccatccatccatccattcatccatccatccatccacccacccagtccaatctataattctaaccatcttgaccctttttatattgcttctctgcttcatttttatctttgcccttgtcatcttttactatttgacacaagttttttatttcatttattgtctgcctcacactttagaatgtaaattccattaagtcagaaattccagtccattttgttcatggtgtatccccagcacctagaacaatacttgacaataaatgataataaatgtgagaaatgttgcaagaatttttattaaatatttatttagcatttactacttttaaagcactggattgagtgccaaaaaggatctaagatgaagcagatatgggtctcactgtcaaggaattccaggccaagaaagctatcaccaaaatatattattttaatggcatcattatatagggggcaaagttgttttcatgagaaaaatgaagcatatgtggtatttatactgtgcctgagtgaaaggcttccccaaggaagtgacacatgacattgaataaggggaagtatttgaaaaccgagagttgtagtggaagggcatcctagaaaaaagtgacaactggaattaacaagtggaagtggaaaatgcaggatatgttggagacagaaaagcaattggttcagtttagaggaagcctagaggccagaaagataataatggagaagatctatttggaaagagtggttgggtcagattatggaggattttgatgtcacctgttggcagtagcgagtccgagattctctcgtatctgaacctctctgtctcccctatattataacttttgaatgacaatattttatgcttcctgttctggtttccaaagcagcaatgtggccatcccagtttgctagagcctggaaggattcttgtatgaaatgcaaattcagtctttgatctacattttgtaggtcaacaacctcagtttcgtggtggtaattacagggctcacaaggatgttgttcttgagtaatgaatctaatatattagtcacaaacagtaagcatctcacttcccctactcctccttttggttaaggagcacaaattgtccccagttctttgagatttcttccgggttcatctggagcatggatttctacctttgcaaacatttaacttgcagccctagagctgtgtaataacagatagtattttctactcctagccttatctggggagaacacacacaaaaaagtgttttttattttggcatgtgagactatcgagtgtgtccttgttccataagtgtactttggcaccaggaagcagagacagcagctttcaagtgatgggagaaacagactgattaagagctctgcctgggcagacggtactgaaactgggtgtgtagtccttgcctcatcatttcagtttttttaatgtaaatttttatttttgattgaaaaataataatgtatgtatttatggggtacaatgtaatgttttattatacacagacatgcacacacacgcgcacacacacacattgtattgcagtattattcacaatcgccaaaacagtttgggggttttcatgaaaaaaattccaattttgggtctgttagtatattttatcatttcccccattctcaattctttttcctctaaattcctttccctctcagttaatgacaccactgtcctatctttccatatacccagaattaaaacttcagtgtcaatgggaaaaactggtcataacatcatctattttaattaaatttaagtaatttatttacttaaaaaatcaagatgaaaatacctaatttaaattaccactgaaggctagcattcatttccatggcatggccatttatttgttctttgacttcatcttctcctattattttcactcctatccattgaataaattctgaaatgggaatagtatcaaatgggagtgttacttccacactttgctgggtggagcaaacctatctcctcacaaaagggatagaagtcagtttgcagtgacttccctgatcctaccagccagacatgctccttgcctctcttcttgcctcctcctttaatatttaaaatattttttttaattttatttatttatttactttttgtagagatagggtcttgctatgttggccaggctggtctctaagtcctgggctcaagtgatcctcctgcttcaacctcccaaagtgctgggattataggcgtgagccacggtgcctggcttctgcctttttgtgataacagatggtaacaggaatgacaccacacttatttgtaccactgtcatggctctaatgattatggctttgaagtagcatcatttgtttaaagagctcaggttggtggcccagcaaactcgggttcaaattatgcctctagtgctgacttaatgacatggggcatgtcgcttgaccttgctgggcctgttttctcatctgtaagatggagattacaaaaactttcaaggtccttgtgggaagtaaacaagttaatatatgtaaggcacatgcacatagcctgggacctggtaaataggtgccaagggtagttattactgtggttgttattgttagagtttttgttttacttgtgctaaaaatagaagattcccaaggacagaagcttcgtcttctacaccttgaagggtagtgtttttaataagcaaaggtgagtgtgtgaggtgtcaggtatgagcactgagctgtggaggctttcttgatcttttgctttgtattttaatagatttcttcttccagtatcctgcctcctggtaatgagaaaggggataaggtaacttacacataaatttggttcaggtacatcattttttgtccctagatcatagatatctatttgcaaggatgcaatctgtgatagctaaatgtttgctttgttttataaaatcaagctaagagaaataaatgttaggtttcacataaaaaaagtccttttcagaaagagggtgctgtaagtatttccattctctcaaagcattctagagacagaaaaagtgttttctaaccccttcccacccccaccattcttttcttttggtgcctggtgaagagtacattaaaataggaaggaacattccagagtgctcaattgcctctgttcagggtccacagctgaatttctaagttctttctcctgtggtttatgcagcctatactttgactacttctagttagacagaaggaaagctcacacattttgcagtgagccaaggtaaaagagaactcttttgtcaaagtaataataacacttagcacttatatagggctttttatcttcaaaaggccttgcaaacattagctaattaagaagtctgctcaatgtgcagcagctgttgaaaaaataaatgtgatgcttgggtgtattaaaaagaagaacgaaaacatgaggacatcctatatcaagcagctgttgtactccgtctaatttgtttgcttcacctggtggaatacatcagacgctaaaatagtcctgccccatagagtaataatggttagggatgaggcagagcttgtacataatggaatattgcaagggctactggatatttaccggaagaggaaaaaccaaagaaaagctgcatcgcctaatttttattacacttttataatcatgggctcatgcagcactaatgaaacagacatctgacatgtctaatgacatgaacatatcgtagattctttaagaagaacctatttgcaagagcaagcattctcatttattcattcaaatttactaccaaatatgtattgagtacttaccagacactggagacatgcatttataaattacttggggacagttttgaaacagctgtggctctatcatcttacatgttatttacctattgtaccttaattttacattaatattgacacacatccacccagacccatattaaattcaatcaacatttttattcgttgattctttggcagaaatgagctaatacaccattgcaagagctgagctattattttggtgatgaaaacaaaatttagaaataaccaaaaaatgttttttttgtggttttctgcaatgggcatttggatatggtcctcttttctttttcttggtttttataacaacagtcattgagctatacctgctgttctgttttaaatacctgtttcaagaggttgcaaattccaaaaacttgcaaatttcaagaggttccaaattccaaaggaggtggtacatgaagagaaaagggacagagatcatataatgtcaaaatgtaagtgcctgcatcccattagagtataccccatgttatttatcaaagtttacacacatgcaaggcgtattagaataccttacttccattgtacagaaggagatgggggaattatactttggattgagttgattgttaaaatggggttgtaagaaaaattatttcctcattcaaggaggacaaattataaaagagatagcaaggaagtgaataaagaagagaaggtgttctaggtattgggaaaaaattgaaacagaaaatgttcctagacaggagaaaaatgtctgaaggaattagaaataggtttatttttgctaaggaaaagttacaagccaccaaataaagtaaagtagcaaggagaagccaagtcatgcaaagccaaggccatagttacaaagataaaaaagcatctacttgtcatttcccaagttcagaggatggaacagcgtgaagtgactagaagcccaggaccaacggttgattttcaaaggtaaatggttggggaggggttgactcggttagaaaaaaagtcaatttcagtgatcacaggctcatcctggagcattgcttacagtaggaaatatttggaaataaatcaaatgtctattttttgttcgatcatatttttctgagaagaaaggattgattaaataaatcaggatttattcataaaatggaatactatgcagctattaaaacaaggaagctctgtcactactcaaagctcaaatataagttgataaagcaaggtaggggaaagtgtgcatagtgttaaaacttgtgtgaaaaatatagatccaaatgtgtgagtgcattcatgcatatttatatatgaagagactatagactaactctggaaggacatgtatgaaaatactacagtggttacccctagtgaagggaatggagaaattggaagactaggtagatgctagactcttactttttagtgtatatttcctccttctcccctaaacctttttttttttaaaaaaagaaaacattttattatgagataattatagattcacatgcagttgtaagaaataatacaaagagatcccatatatctttcatccagttttctccaatgataacatcttatgtgaggagtttaatgtcacaattagaaagttgacattaatataatccactgaccttattcatatttcaccaattttacatgcctttgtgtatttgcatgtgtgtgcatgtttaatgctatataattttatcacatgtgtaagttagtgtaaccaataccacagtcaagatacagaacagttctatcacaaggatatctcatgctacccctttatggccacagacagctccctccttctctcccctccttactcctggcaaccactaatctgttctccaaagccataattttgccattttaagaacgttgtataaatggaatcatgtagtatgtaaccttttgagataggatttttatattcagcataattcccttgagagttatccaagttgttgggtgtatcaattcttatgaagggcatgttgttggattgttgtttttatccactctgcactccacaaatctgatttttaattagtgtatttagaccatttatatgtgaagtaattattgatatgctagggcttaaatttgccatttaattgtttgttttctgttcgtttccaccatttctcatgtttctgtttgtcttttcttatcttcctccgggttacttgaacattttttggatttcatgtttatatatttacagtgattttgagtctatcattttgaatagttctcttagtggttactctaggtattataatatacatatataaagtagtaatatctatgtgaattatattccttttttaccttttgggctactttgtcttacctacaagttaaatttaaaaataaataaaactagcaaaccaaaacactcctacatgtatacctacttaaaacaaataaaactcacctctgtacagaaagattgtagacaagaaaagaagtgaaaaccaaagcacttcagaagtcatgcaaagaaatcttgaataagaagaaaggattaaaccaaaacttttagggcatgactgagaaattgaaaactgggggctgtccaggacattagaagcctggagcagagaaagccatgttattgagtatgtaagtttgttctcacattgctgtaaagaactacctgagactgggtaatttatgaagaaagaaggtttaattgactaatggttccacaggctctacaggaagcatggttgggagacctcaggaaacttacaactgtggtgggagggcaaaggggaagcaagcacatcttcacagggcagagagagagagagagaaggggaaagtgctacatacttccaaataaccaaatcttgtgagaactgtaccatgagaacagcaagggggaagtttgcctccaatagttaaatcagctcccaccaggtcccccctccaaccctgggaattataattcaaaatgagatttgagtggggacacagagccaaactatatcattgagtatccaggccttgtttttttatgacctactgcttaccacctggtagacctcatttcatttcttaaactctttaggtttcaaatataaaaggaagttaataatggaacctacctcgtagaattgttgtgaagattctcaacatgtatgtaaagttcttagtgtcatgtctgacacatagacaaactcaagtaattgcaatcatataactgaaccttttcttgagtgtctactggggtcgcaggggttgcaggttacaatgatatggtgccattcctcagaatgagaagatagtgccccagacatgtttatagaccctttgatacttccctcgttggatgaaaccctcttttcagtttctttccactaaggatagatttcagcatatcactatgcttgaagtaaaaagagcttactccaggcctcttggctcttgtccctaccttagactgatggccttggtatttggtatgtgaagtagcagtttggatatggagtacaaagagtgaaaaaaaggttggatatggatttttagactcttactttgggaggatgagaaaaagttctcagaattgataacattgtccctagtagtaagaaatatcatttttcctgtctttctaggcatccttgttgatagatctttggatagaattttttgcagagaatggatgatgtttactttttttatatgtaaatgattctaaaagttgcttttttaaggctgagcacggtagctcacgcctggaatcccagcactttgggaggccaaggtgggcagatcacctgaggccaggagtttgagaccagcctgaccaatatgaggaaatgccgtctctaataaatatacaaaaattagctgagcatggtggcatgcgcctgtaatcccagctactcaggaggctgagacaggagaattgcttgaacccaggaggcagaggttgcagtgagtggagatcacaccactgcactccagcctgggcaagaagaacgaaattccttcccccccccaaaaaaaaaaattaaaaatttgctttttttagtgtttttgtacaaaggatcatcgtggtatgatggcgcttcacacatgcagaatggtcatcttaggctattgtaaccatgtagagagcaattccttagggtggtgtttttttgttgttttttatttccttcattcccaacttttatggtgtagagctctggctccatttcaaatcagcggaaaaattatcatcagacctaagaatgttttcttttgagatggcgtctcactctgtcgcccaggctggagtgcagtggcgcgatcttggctcactgcaacctctgccgcccgagcggcaagtgattctcctgcctcagcctcccaagtagctgggactacaggtgcctgccaccacggccggctaattttttgtatttttgtaaagatggggcttcactgtgttagccaggatggtctccatctcctgacctcgtgatccacctgcctcggcctcccaaagtgctgggattacaggcgtgagccaccgggctcggccaagaatgttttatatttcctagtttctcttccttttgtgggtcctaatcttttgtttaacaattgatttctacttcattttgactatatattttcttttcaagcctttttctccctgcatcttgccaatatccctaaccccattcactctcggcaaactcgcctaaatctcccaccatgaattttagtcccaggttagacttttaacctcatctcccattgaacaaactgcaaaaaatattaatacaaagggcagtttagagtcaacaaaaattgagaacatttgcagctgatggtaccatctgtgcctgtcaaactctggccaagtagttttccatggtggagaaagagagaatctcatgacggcttttggtttggggttattgagaactgagcctgcactggaggaagactagaagagctgggaggcagctctttctctttgtggtgtgtggctcatctcccagaaaaacaggcctctcccagaaagtggtcaaatttggcatctgagacctgagagtggcctcctgtgggtcctttctctcctagcccatctgcgaaaatcaatctgtgccaggtgctccacatggcagaggggagtggtggagtcatgaaaaagaattaagcaaacaaacaaacaagcctcacagagcacacaagaaatttctgaagagaagtttcccaggcttttgatgaggcgaaacaggaggaccatagagcagcagaggaagaggaagggggaggatatggaggttacctgatggcctaattggttccgacaatgcactcctttgttgcagagaatctgaatcatggaagaagcaaataaataaagaaaaacatatggcagctaagtcatatcaatctacattaagaaaaataaatgagaggatattagggagaagatcctgagaggagaaaggcagatggggactcttagaaagtattcttaaaatgggcaggaaatgtgaaaagggactttaaaaagaggattgtgggatgagcaatgaataagtaaaagggtacttaacctcatcactcatcagggtagtgcaaattaaaaccacaatgagataaaaatactaccagaataactaaacaaaaaatgatggatcaaaccaagtgttggccaggatatgcaggaattgaactgtatgacagtgccggtgtgagtgtaattagtgcaacccctgtggtaaactatttattgctattgttagaattgaacatatgcatatcctacatcatggcaatgctatttctaggtgtatacccaggcacaatgagaacatatgaccactgagcatcatgtacataaatgtttatagcagctttattcacaatagccatatttgaaaataataaaaatgtccaccaacagtagaatagataaatatattgtatatgtcatggaacactatgtagcctgaaatgaatgaaatgagaaagaatgaaatgtggatgcgtctcacaaagataataacagaaaaaaatcagatgacctggatgacaaagaagcatagtgtttggagtgttacatgtatttagcacattatggagaaaatagagtgataacttgagttctagtgagctccaaagggatggaatgatatgtaaaaatcaccagaaatttgtttaagccatactgaacctttctataatgagacctaaatagaataaggtactgggtaatgaatgtttcccaaattatggcatgaatgtttaaggactatttcattttaagagatgcagtgtccagaaattgtcaccatggtagtagtttttaaaatgtgttcctcagagctgattggctctaggagtgtgtaactcaggagtgtcatctaccatctgtttatctatctagttaactatctattgtagagaaggttgtggtggagtaaaccaaacaggcagcttgggattcatttgttggggatctgcacaagatattgttagaaaatagtttgggctgctaaaaaaaaaaaaaaaaaagaaaaaaaaaaagaccacttctttagagaactgttagtgtgatgataagagattatagggcaccaggaaaatctagcaaatacagccatctaaccaaaaggcagtattaccatccttgctttgccaggggcaagtgttgatatagacaacatttggaatttggagtctggagtgaggactcctcggaatatgacacttaaagaagcccctgataaaatctagctaataggtagcaataataatattagtaaacatttattgaatatttactattatttagtgatgtctgctatttttatacatcatttaatcttcacaagagcacagaccttgtagtcatgaagtagctgctctcaggctcaccctcccaccaagaagctgaataaattactgtttgtaggaatcagagtacaccaaaatgggctagcatttgaaagatcaagaattctcaaagaaggaaatgcattgaggtgaatgggacctctgtgggttgtttcctgtgatgcatatgcaatacttagaagaggcatagtagcctagatcttacaggaattgcagtgggactggtagatgaaaattcatgttcagggataataagacagccacaatatgagggaccaagattctggagagaaggaaccacagagatctgagccagaattctgcacgtgactttccctgaggaatttgcagatttctacaccacactagcagtgagatactgagaagccaagaagaatgcagtagtttaaaaggccaaaaatctaagcagaaatgtaagcaatcccagagaactgaagagacagaaattgtagttcagagcctcccaagcaagaaggatctttataaacatggcagattctcaattgagaatctgaagagctagattctaatagtatgggcaaactgaacatagaccattctctagtggatcaagataacctgtgtatgttctgtcttccagaaaaaagtggaatcctctatgtaggatttcagggtctaaataattattttacttaccatgtatgataggcaatagaacattaccaggcatgtcaggaaatataaccaaataaatgaatttcttagtgaaaacaaataaactgtaggttattgatatattgggattatcagacagatttcaatacaactatgattaatatgtgtaagaaaatagatatcagattgattatttcacaactggaatctgtagacaagaatacaggggaaattctagaagtgaaaaacttaagaatctaagagatatgtttaatagcagattatgcatagtagaagagttgattagtaaagctgaaaatgtttataaaaataacggatcaaagcatcaagattaaaaaggtgaaagataaagaaaagagcatagcagacacccagtgaaaaatggtgcttctcaaagtatggtcctgagaccacttctggtgctggtccctgacaacatagagtgttcataaatgtttatagcaattgattttgccacaacattttaatagcatattttatgacaaaattagactctaagggattataaataaaaaggaaaaatattaatcacgactagtttcagaaacattggtataacataagtatgttggagtcccagaaatggggaagagaaagaataaggcagaagtaacatttgaatctctattggctaagaatctttcaaaactgataaagcctcaacacacaacttcaaaaggcttcatggaccctaagcagcataactacaaataaaaacttacctaggtacgttagaacgaaactgctgaaaacctaagaagaagaaaagaaaatcttaaagtctgtcagaaaacaaaacaaaaaaaaccaatcttcaaaggaactgtagttcctgaagctgctgccttttcaatggaaatggtctagaatccagaagtcgatgaagtggcatcttcaaagtactgaaaggaagtaaccaccaacttaattctatatcaagtgaaaatatctttcaaaataaaaataaaatatttgtggataaacaaaagcaggtaatttgtaaacagcaaacccacattaaaatattatttatctatttatttattttttttaaagttgtagagacagagtcttgctctgtcacccagtctagagtgcagtggtatgaccaaagctcactgcagccttgaattcctggactcaggcgatccttctacttcagactcctaagtagctaggattactgttgcatgccactatgcctggctaattaattttttttttttttttgtagaggcagggtctctctatattgcccaggctggtcttgacaggctcaaacaatcctctgacctcagcctcccaaagtgctgagatttaccggcattagtcactgcaattggcccccacactaaaatattgaaagaagctgctcaggcaaaagaacatgatcccagatggaagtacagaaatgaaagaagcaatgaagagtaagagaaaggtttaatataaaggagcatatagataaatgttgtgcaaaacaagtaataatgtctagtaagattaaaatactatgcattaatagccaaaaatgcaggagcagggtaaactattaaaatgttgtaaggctcttgcaatgtttcagaacttatgaaggcatacattatattatattctagtaagccaagaattaataatgcaattttaggatgattactaaaaagaataacaaaagaatttagatgtaacaaactaagagataataaatgggaaattttcttaagtacttgataaattttttaaaagccaggagaaaaatataggaccaaagaacaaatgaaatagagaacaactgtgaatgtgttagatttaaattcaaatatgtctgtatttacattaaatataaatggcctaaacattctcattaaatgacatattgcttaactatgtaaaaaataattttaggctacataaagagacatactcttaaatatcaggcacagaaaggttaaaaataaaataatggaaaaagatatactgtgcaaacaccaatgataaagaagctaatacagctgtactgatattaggcattatagattttaaggaaggaaatcatgttaaaaataaaagatgccatgacatagtgacaaaatgggcaatttgacaggaatatttaatgatccgaaaagatatgcatttagtagcacaaaatatttaaagcaaaaactaacgaaactaagaagagaagtagataatctgacaatcatagttggtggttttaatacccttttccttctttaactatcagcattagccaacaaaactatgagtgaagatttagtagatttgaataacacaattaacaaacttgatctaaatgacatatagaactctacatctaaaagctacagaatgcatttttttcaagtaaacataacacctttaaccaaattaatcacatactggtcaataatgcaagtctttaaaaaattcaatgagttgaaatcacacagaatatttcctctgatcagagtggaaataagccataaattaataacaaaaagataatgagaacatacacttaatgctgtgacccagtaattccattcctagatacctcacattcatgggtacatttggcatgaaaggaagtatacaatcatgttcatgcaaatcaaaaataaccctgtgctcattaacagtggaatgaaaaaattatatgtcaaaatgatacatcatatattcatataatgaaatagtgaatgagctagtggtatgcacagcatgcatgaatcttgcagatacaatggtaagcaaacaaagccagatgcagagaatgcataccataatatttcatttatataagccaaaacaggtaaaattaagcgatagtgatacaagttggaatagtgttctgttttccttgtggacttgttatacttcattaacacatgtttaaaaaaaacccaaaaatatcgcaagataaaaaatgcagaagcattttctgggtaaagaaagatgggcaaacattacaaacagaaggaaatttggggggttcaaattctgtatcagtcatgagacttctttcctccaaaaaacttacttttgaacttttaaactctattaacattcttatctattatttattatggaactagatataaccacttatagtaattgtctcaaatctgatttctttccatctatattacatgtagggtagtacgatgtagtggttaaggacacaactctagagagagactgaggttaaatcccagttcaaacatttgggcaagtcacttaaactctctgcatctcagtttcttcactgtaatgtagaggtaatagcaatatctatgtcagagtgctgttttgagaattaaaagaatcaatataattagttacaacagtatctggcacaaaagtaagcactccgtaaatatgtgtgattgctactataattaccttggaggatcggatcattccttatatttgttttaaatccctcgaatacctagaactatacaagcaatcaggaagacgggctttctggacagcgagaagggaagatattttggaaactgactctgttttctctctgtgggtgaggatgagcttacattgatgacaagtttggcttatgaactaggaccttaagtagagctgcataaattagtgtaagtgttattaataagatgggaagaatttgctttctcagttctggcaggaatttatgaccctgagagtcactttatgaccctgagtttgccataatcagcttagtgttctgataggaaaccaaatggtaaatgccaagacgctggggcattggtctcttgtctgcatagtcaccttactttcactaggatctttattcatgttctttatttaagttgggaacttctagcaaggttatgtgtgtgtcgtctacagatatgtaagcaacctggactctgaaagcctatatattaaaaaaaaaaagtttatggattgaattgaattgaatcatactgacttgaactggagtgaatcttgagagatggctaagaaccaggaaggcttagtggcttaacttgtaaggctatgagtttgattcactagatatgtaaattttcacaagacacttaacttttcaggcccttagcttactcctttgtaatttgtggctaataatcataggaaccccacagggttgttgtaagaactaaatgaaaaatgtgcctggtacatgtattaagcattcagtaaattatagcaattgctattattgcggttgctatttttatttctcagccaagaggctcaagccagggtgaatgaattgtgaagctgcaagcttttcaaatgtgctccttccttattttaaaatcctttttgtttttattctcctgacaaccctgagagcttggacagggtaggggctattatctacaggtggcatttgagataataacatagagagataaagtgatttgcctaatgatctcataactgtgggtgttagagttaaacctagaccccaacattccctagagccagccttgagatttttattaattcctgctctatctacctgcttatctcctgataaccagcaagagattattcttcacctctgtgtagaagatttctgaaagaggagtattatccaaattaccagcaaaagaaaatcttatcttttcagatatgatagatggctgacatagatcagtagaggtttttaagagttctaaaaagttaaacatggaagttttattttagggcctggcatcctcacttacccatactgggactcattttacccttaacctctctccagcatggtatttcatcttactgcattcttcttgctttatagtgggctttttccagttctctgcctaacttaatgaagaagattatctcaaagttcccaagattgttacttctcatttcaagctaccaggagagactcagcaataaatttttatattggggattcagtttccttgagaaatctttaagtcaataaccaaaccctttaaatttccttaacaatggtgactgtagggctgtgggaggtgttcttttaccttccctctcggcactaaatgtaagctccctgaggacagggactttgtctatcttcctgcaaaattcctcaggggacagtacagtgcctggcacatagtaagtgctccttacatatttgccaaatgaagggatgatgtcccaactccaaaatttgttatattttaattaatttcatatctttgttatcttttgctatatggatagatttttagcttagattctgtttagatgctttttggtttgattctggtttgggcagcttgagaaggctgtagaattttttcgtgttctagttagattttaaatttcctagctcctcagtagagttttctgcctctcccttggcccaagtatttaagtccccaaatttacttgcttttgaagactggattttgaatgtaaataaatgaaaaataattattttgtcttaataataataattaaattatagcactaagtaatttaggaaattttagatataggtagggtattctgttgactgaggtcataggatattcttaaaattggttttttgatctgagatacagcattctattcttgccaggtcatataaaatagaatttgctactattacttgtatttgatttcccctgataggctattcagctaggccagccttctatgactgaaaaaaaatctttaacaaacaaagctgacaaaacaaagtagtaaactagcctgctttgggtttcaaggtgagtctccggtggactctggagcagaaatcctaagtttcttctgactccttggcctgtctgatgccataagagggtgcagggggagatttgctctgcttctcttctgtgtcaaggcagactgagaagcttttaatccactatatttcaaacagttgcaagtaaaaaaaaaaatgtcatgggaatacccagatgtgggcagataataaccctactttttactcccacttattaatccataagaaggaagggggtgagaaatagtctttggacggtcagctatccatgtacagtagttggatgctgagcccttttcaaatgtactcagaataaaagtgaaaccctactacttgttttgcccattagatagcattatctccatggaacgccaattcatatctctttgtgctgtgtgtggttctcacatatgggattttaataacctccatgctgtgctatgaatttataagcagagctgatagaggaaaagcaccacaggactttattttttcattattactcttttgaaaaacagggtctgcctcatttctgtaaggttctcacagtactggcaatgttgcagccagaggtatagttgttactatggaaaggactaagctctttatttatttgctatctatttttttccagactccctttcccactgctgtcctgcctttagccacctccgtaatatccactggcattgtacttgaagcttcagtgaactgattgcaaggaaataggctccatttgttctctagctctgtggtttatcttacattctgaatgttttttctgcccatccttttaaatgtggtcacatttctcctctgtataattctgcaggtccaagtatcttatttagtgcagtggctaagacaacaggctctgtagtcaactagtcatggatgtgcatgctgacattgctctctgatccttgagaaattatttgagttttgtaaattcatctatatgatggtaatgataaaccttcctcctaaggttggtgtggttgttagttggtatggtgtggttgttagttggtatatttccttttttttttttttttgagacagagtccccctcagtaacctaggctggggtgcaatgatcttggctcactgcaacctgcattctgtaaaagggactaaaggggaggatttaccctaagcttgattgagtgttcaggaaaatacttctttgagaagctgagctctgggctaggtcctgcatgatgaaaaggtatctgcaaaatgggaggatgagcagaagacaaagaatttcaggaaaaagacagaatagtctcagtcctgaggctgagacaagaacatggcatggttgagaaatgtaaagaaattaagtgtggaggctgaccatgactgagatggccagagtccagggcacctggagccacatgaagagttttgaagtttattcaacatggaacagaagccttgttgatttgggggttaacacaagtagtgaagcagtttcctccaggtttcttctaccaaggaatgccagagagcagtgtcttgctttgtgtgattagtgttttgattcattacttttatgggttgatatgtcttgtgagaatatgagatgtggattccagagcttaaaatctgcacgtttagtttgaatgctaattaccacaaatatgtttttaattgataactgtgtttcgacatacttcattacgtttgacctttaagatcatttttaactcatcctctttaaaaaagttctctttgaagaaaatataacacacatcaatggcattttaattgtttacctttggaatatttttgtgttggacacaatttatccatcaaataaaaagtgaaaaaagtcatattttgagaaaataacacaaaatagggccaagtgccaaacatcctaatatatttgttttctgcatgatttattattacgccttttttggtaccatttactaagaatatgtatgacttaatttttcataatagccagcaatttaaggcagcaaagtatttgctttcttccactgatctagtaccgcctatcattgtatcatactgacctttaatccagctcttacacacaaagtcagttatctgtatacttatcgttttaatgggttttgatagatttccccatgctcatttagttatataaatgatttattatttatgtttgttttatgatagtttttatgggttttgttttgttttggtgaagccattttgtagtctaacaaatatttcttaattgggtatgcatgaattttggctaagttgctccatataaataaatgttttgattacttctaccattgtctacagctgttatcatctttaacctccaagttttcttaattttcaaaaggaatttattgaatttaatctgagccagtaagacgggctttgatgttaagtaatagagattagttgcccctctctgatgtctacgttactgaaaaattattaactaccaaactcctgtgacacagtatccttcaaattccaaaacttagctacagtttaccttactaaaatctctgctactggtaatcagccttttagccagtgcagcatatattcagcttttgccagaagatggtttgctcccaagggcttttggctccaaagactaagtgttacttggtggctttggcaggattcagaggagcctggctgctgggaactgacatgctcagagcttgccagccccaaaccattgtgtacctcacagctctcagtgccaggagtttgtgtgccaagaaaacagaaacctgtctagaaaataaactgttttctcttgcacatgtcctctaggaagacaagaagaggttgaacctgtaaattgttttgtggttagaaatgttttaggtttttacatgggaaatataatgctataacttcatatgtaaaacaaaatggcacattatttatgctcctcaaatcattttacctccaattattaaaatgcttatatatatatatgtatttttttttttgagatggagtctcgcactgtcgcccaggctagagtgcagtggcacgatcttggctcactgcacgctccacctcccaggatcacgccattctcctgcctcagcctcccgagtagctgggactacgggcgcccaccaccacgcaaggctaatgtttttgtatttttagtagagatggagtttcaccgtgttagccaggatggtctcgatctcatgacctcgtgatccgcccatcttggcctcccaaagtgctaggattacaggcttgagccacctcgcctggcccaaaatgcttattaatcttttaagtgatcaatatagttgttattatgatgacagtcatttcagctcttgcactgaggcagttcctgtgtgtgaaaagcttctaatgtgagtgtgtgctgtggatgtatggagatcaccccagttgggtggttgtacatgaatgaatgtgggttatgtgggcaggtaatgctggagaagtcagtggaaggtgaattaaccagctaacaaaacatttggataattgaatgttctttagaaacaaatcgtaagccattaggaaagaccttccttccttccttccttccttccttccttccttccttccttccttcctcccacttccctttcaccttccccttccccttcccttcccttccttttcttttcctatagcacataacattggaattgactctactcactttcatccaactatccctacctcttcttcctacttaccctagatttttatttctatttctctaccagttcatattttcctccatctagttttcatcagagaaaattttctgcttcatcaaacacaaaactgagatataaatgtgggagcatatgaaattagagcttgacctacatttagtacaattagtattattctaaggaagtagacagttgtggaaaaatgaaacttggaacacagaaaaggttaaattcatggcgcttatgtagcttattttcattaggcctgttacctaattacttattagaatttctttctatcttttagaccttagtttctcaaccttagcactattgacattttgagtaggataatgcttcgttgtgggtagggggctgtgctgttctttgcaggatctttagcagcttcttggcttccattcactagatgacggtagtatcccccaattgtaacaattgaaaaatgtctccagacattgccaaatgttccctaggggacaaaattgctccctggtgagagctgcttttttttagatccaggtgcttagacaaatgatgatataaatcagtacattaagtagagaaatttttttaaaaatcagtttctaaagactagatttctcaacaacttatcacattatttccaacaacattcaaattcaaaagctgatgcccaatgctagcaaagtatgaatagatagaaagtaaacatcttcctttgcattagataagatgcccagcaatggaaatccctggatttaaagaccttgttaagatgtattatgtcagatgaaaagtgctattttaataactcattgttattcttagcatggatcttttattttagaaaaatggataattagcattttggcttatcactttcccttaatgaatacaaataatttgatagacagacaaccaagagagacttcattaaataatgggattaatcagcctgggactggagtaaattagaggttagacttccagcctgagagatggaattcagggtttggtggcaatgtcatccaattcatgaaggatatttttcttgattgacctaatgttgcagtaaaaaaccagagcaagggtcaactggccaaaaataaaagtcaaaactcagcttgggaagttataggctacactgcatttaacttgcaactggataattgcaagaacacattcaaagcgtcactgcaaagcccttgttgtttagccctagctgcttcaatttctagataatggtccattattaatgtggaagtattagaaagttttccagggaaaaatatcaacctggaaccattcccctttgcatgcattatacacttcactgccatctggttatccataatatccccaaacccctaccaattttccaaaaagaactacaaataacgctttgtatttttagaacagtcttcctaacacccagagaggaaatctattgtgaagttaattttctttttcaaatgttttaaagtaaactattctttatttctaagaaacaaaacccaatgctatgtttaagcagtgatttggaactgtcttactgtcactcagagaagacaggttagtggaatctttaaggccgtggctgtcttttgaagcttatagtgtagtctttagaaagtcttcagaaaagatcatgattcttatggaaggttatttctgtggggcagtgggagaacttagatctgagaaatcattctcatcatgagttagaggaatgattttattcacaattcatactcttcattcattatccaacctacatagaagccttagttctgtgtatccttaagctgcatttgacattttacctcctgatatttttctaagtagcatttttctaccaacagactcaggtgaaaaagaaatgaaggtatcaagtatatgatgtgtacacatttagctttattactagcatcttctaagaaaaatagcaaagagctaaaacgaaaacagaatgattctataagtcctgaagggaatccttctgtgatacaatacaagcaatagaaaggccttatttctccctataaaatgtgtgtaattgtgcttttccttatttaatcacatgatttgtctttaataaacctctactggctcccaagaagtgtggatcctggtaacaagagagtctttagtgcgctgaaggagtgatggttgtgaggatacaagagtggagaaatgagaagagataaactactatactttactaagaattggagagaaacaaagagtctagggtatgtggtttggaagaaataaagattcaagaggggagggtcttcttccatatccatagagcatcttaaacaaagtttatattgtccactgatgctctgtggggtggctttccttttgtggagtatgagtagcagtgttgaattttacctcaagttactatgggatagatagggaggctgctcttggataagtaataaatgcgttgcagaagttaagaaacagattccagaagtagagaaatctatgcagaagcatatagctagaaagtagcagagtggtaattgaacacaaatctgatgacagagccaatgcttccttttattctagcatgctgctagaaactggttcttttataatagtcttaaaataccttaagtctttgagatgagatgaaagtgaaatatgatgaaatgttgaagattgtaattgaaattatacaattacatatctctttcatattaaactttcaaagtcctggtactaatagcttgtattttaaattatgtcttcattgtttaatccatattgaaaatttggcttatgcaaaattatatgcctttgacaccaaaaagatatagaaaagatatggccactatatgataaatttcttatcctctctaataagaaataaatatttagtcccaggttttgaggtgttatctatactttttcaagcctaaaactttacacttgaaaattagtgataaatagttattataggtaataggtatgtattgacaagcacttgcttgtttagatatgatactaaatggttatttatttatttttatggtcaggtttctcaataatatatccattcataattcattggcttattaaataggctctatatttcagatatatggctacagataggagccctggtgtgaggcagaggggggctgtgataatgacctttgtttcagcagtgactcaaggacaagattccaaggctcagaattttgcttttattttctctgtatgagtgtttttgtctgtcagtaaacctgttttgtgaaatgaaacaaaaaaaggtttgtttacattttggattgcctttgcattagcattttatggcaattggtctggtttgacttaaagtcctcttttttcatctttaaagtgtgaggttgctacaatattaagtgcttaagatatgccactactgctctatcaaaattatccatgcaggtcataaattcgagttccaaaaaatgtaaaggaggtcatccttttgggcctccttcatgaggccccagcataccagacctaaccagaatggagtcttctcatgctaagtgccatgtaatcaaactgaacttagaaactagccagtttcgaaaacaggagtttcacagcaccaaatccaaaggtgccctgtcaacctgagctcttatacactgttggtagaaatgcaaattagtatagtcattatggaaagagtatggagatttcttcaaaaactatacatagaactgccatatgatccagcaatcctactactgggtagttctcaaaaagaaagcaaatcagtatatcaaaagtatacctgcatcctatgtttattgcaccacaatgcacaatagcaatgacatggattcaatctaagtgtcatcagtggctgaatggataaagaaaacgttacacacacacacagacacacacgcacacacacacacgcacacacagaggaatattattcagccttaaaaaagaatcagatcctgccatttgcagcatcatgaatggaactgggggtgattctgttaagtgaaataagccaggcatagaatgacaaatagcacatgttcctacccatatgtgggtgctaaaaagtttatgtcatggaagtagagaatagaatgatagttaccagagttttggaagggtgtggggctggggatgaagagaggctggttaatgggtacaaatacaccattagaaggaataagttctaatgtttgatagcagagtagggtgaatatagttaaaaataaggtattgtattttgcaaaatagctagaagcgaggacatgaaatgttcccaacacatagaaatgaaaaatactcaaggtgatggataccttaaatactaacttggtcattccacattctatgcatgcaacaaaatgtcacatggatgccataactatgcacaaatattatgtattaacaaaaatacttaaaaaagaaaaaaagtcccctctgctttaaccctataaggaaagtaactttgaaatgaccaattgggccaggcatggtgactcatgcctgtagttccagcattttggaagaccaaggtgggaggattgcatgagtccaggagttcgagaccagcctgggcaacatggcaaaaccttgtctctacaaaaaatataaaaattatccaggcatggtggcatgcgcctgtagtcccagctacttgggaggctgaggtggaaggatcacttgagcccaggaggtagaggctgcagtgagtcgagatggggccactgcactcctacttgggcaacagagggagacgctgtctcaaggaaaataaataaataaatgaccaatccacttcttattccttgtttcttctttctacagccctttttttcccctataaaagcctacctctgtctgcttagctcattggagcacctttctatttagtagatgggatgttgctcagtttatgaattgctaataaaagccaattaggtctttgaaactaaatttgttgaaatttgctttgttgatgccactattgctctttatcaaaatgatcccatagatagtctatagtcttttcttagtgttttctcccaaatctgttgggaagatactaagaaagttccgtaagtctgaaatctggtcctaaaactgtgtccagtaggtaccattgtattcaatatagcattttggtttaatcttgatcttctaaagtctgagtatgttctttagtttgtctagtttctgcagtcttgtgtactaaaagggtagtaattttcagttagctaattactatgctttacacagttatagggacgaagcattttagaatggcacttcattaaagcagtaaaaatactgtgggctcagtaatctcatttactgggtcaatagcccataatatctagaagaagatttaaagtagtttaaaaataattattcaaacgagaaagggatttcaaactataattaccatagcagtaaaggaatgaatgactccaaagcaaatataaatattatatttaaatcttaatatctgattgctgtaactcaaagggtttagctcttccaatactaaagatcacaagatcttagacctgaaataaacttcagcaagcagccagtcttggtgtagaaattaaattttttcctgaaaaaccacttgtagttaaatatccagactgacaggctttttgcagctcattcttctataagatgctttttttttttttttttctgagatggagtttcacacttgttgcccaggctggagtgcaatggcgatctcagcccactgcaacctccgcctccttggttcaagttgttctcctgcctcagcctcccgagtaactgggattacaggcacgcaccaccaggcccagctaattgttgcatttttttttagcagagatggggtttcaccattttggccaggctgatctcaaattcctaacctcaggtgatctgcccacctcagcctcccaaagtgctgggattacaggcgtgagccaccatgcccggccaaggtgttcatttttcttagagcatttgcatatctcttactcagttttttcccatgtatttgcattttcgttgctattgcatgttagatttcttctactgtggtctgttttttgtattgttttgttttgttttgtttttgctgatgtactgttggcgattttctgtatccatgttgtggctggttaccatttttaattctcctattagttctaatagtttttctctggttgctgtgtttgcaaggagaactactgtgtcatctgtaaataatgattttttttcttctctatttcagtattaatacttcccttcaccctgcctctgggtttctgtgattacatggagtagagcttccagaacagtgtaaaataaatattagtggacattcttattttggttccagtcctagtaagaatatgtctagttaagagcttctagattatgttccaaaccattattccacgagatgttaattgatttcctacaaaaaaaaagagagtcttctaaataatttccttgaactctgaattaaccaaaatgagacaaatctctttagtgaatgggcttttataacctttactatttaatatgcattgacaatctcctagagatggagaaagtatgtgacttttcccaatatatttgtcatagaacactgtttttgaagaacatttactaacatcttataaaacgatacatcagtggtatctttctggtattgttctggtagggtactgttaattgtgatgtttggggtttttggtttcaaaatgatgttctttaccgtgttaagaaaatatcctacttttagcttacttagagtgttatataaatcaaatcttttactatatgctttattctatctggcttttgctgaatataatgttttttatatttactgatgttgtttatttgttttcaatgctggatagtagcccttacacaagtatcataaaaatttgtgtggtttgcaatttgagggagtttaaacaatgctgctctaaatgtttgtgtacatgaaaattggtacacaaaaagaatacatttttataggacatatagcaggaagtagaatttctgggtcatagagcatatatacattcaggtatacagtagaatgctacagttttcaaaagtgttaatgaaaagtttacactcccgtttgttgcctgagacttccagttgcagtgcattttttttaaacactttaacttttaattaacaaaataactcttaatttcaggtaacctggtatatatgcagtaacatctcgtttttaaaattggcattttctggattatgaatgataaggaccttttcttgtgtgtatttgccattggatttcctctttaatcaataattgcatcttatgccaattttttattgttttggctgattttattatctatatataggaatttgttatgtattttgtatattaacccttcctatgattgtgttctccctctccatagcctgcctttcacttttaatgtcttttgagggatagtataattcattttatcagtcttttcttctactgtgagtgcttttctattttgtttaataaaaatgtttcctacctgatggtatgaaaattttctcctgcactttcatcttaaagcattactctattgtatttctgatacaggttttcaattcacctagaactgaaatttgtgtataagtaagggtctagattcacctttttccatgaggttattcagtgtttttaaaaatgtctcatttcctctgcccagtactctgtttggcactttcatcacaaacacttggggtctttattatgttgcatgggtcaatgtgtctgcccttgtgtccacaccatcttgttcctcttcatcaagggcattagctttcttggccctttgcatctctataaaaatgttaggatcagtttgtagagttccatggaagaaatcttgtggtatttggggattttgattgagattatcttgaacctatagattcatttgaggataatttacctctttacaccattgaattttctattccatgtatatgttatgtctctccaaatatgtagatcctttttaatatttctcaataaaatggtgttattttctccacagaggtcttgcacatcatttattagacttattcctaggtatttaatattttgaggcagtaatgaatggcatcttttcttaaatttttagctatattgaaatacaacatatttggattctgatttgtatctagcaatcctaactctaataaaaactataacaaattatatatgaatttttaataccatgatataatctgtagataattatatttttgtttcttcttcaatcttcaaactttttttattttttcatgacctcagtataatattaaatagcagcggggatagtggaaattattgttttattcctcattttgaagggatagcttccaaaaatttaacattaagtattaagtacaatgtctgctatagaatttttgtttagtaaaaacattttatcagactaaggaagtcccttgttgttttccttaaataacagttttaaattattagtcaacattgaatttcctcaaatccttttgctgcatctgttgagacaatcaaatgattttacttttgagatgatcatttgattttactgttaatattgcaaattacattaatttatttttctccccaactttttttgttgtgaagaattgcaaagagttgtaagtttctgaacaccatttttacttgaaatataacagccaacagacaaactatgaatatttagattttggcatttggaagacattttctcaaaaatgaatgaagtgggcctgcctcttcaggaaaataacaatgattttttagaatataagtgagattggggaccaaaagtttgaaaacttctgtcctcttagaaagtgtaatgttacgctgggcatggtggctcactcctgaaatcccagcactttgggaggctgaggcaggcagatcacctgaggttaggagtttgagaccagcctggccaacatggtgaaacctcatctctagcacaaatacaaaaattagctgggcatggtggtgggcacctacaattccagctactcagctactcgggaggctgaggcaggagaactgcttgaacctgggaggcagaggctgcagtgagctgagatcgcaccactgcactccagcctgggtaacaagagtgaaactctgtctcaaaaaagaaaaaaaaaaagaatggaagatacttaaaacacttctaattttatacctcctctcaagttgtatgctattttataattttcattataaaatttcctctttgtttttgtatgatgaagctttactataatgtttacatgtggatttattttacttgagagtaattgagccttttgaatcactgaattctcataaattctgaaaaattttcactgacttgcctttatccattttatctcttctctccctctgagatttcaaataaatgtatactagtccttctcattgtattctgagtctcttatcttatttttttaaatctcatgtttcattctgagtacttgcttctatcttctctttcattaattctttctttagctttatctaatttgctgttaaattcatttcttgagttctttatttcatgtattatatttatcaattatcgaatttctaagtaactattttacatatctgctccatcactttttatagttttcatttccctgcaaaatttttcactagactccaatctcattgaacatcgtaaacattgttttagtctatatcctgtaattccgtatgtggagattttatgtgagtatttttgttggttttctttaatggtggtttgtttctttttatatctgaagtttttaattgtgtatggggcattgtgcttaaaactttatttgtaacagtgatttgagacctaggatgatattatcttcctccagaggagatttttctttggttgttctaggtgtctaaagtcaatagaagttcaggaacacacaataaaattttcaaaactgaggttatcagacacaacaaattgacataaaataggttgacagattttataagactggtttattttcagttcagacttaatcttacaataactctaggaatcctagttcaaagtgaatgtttgtttacccttgggctctggattctgatttctattcttctaggcccaacatgcttccagaaacagagctcacctattccttccagaattactaatgcccctggggcaaaagcagattttagtgttagtgagctctagtcttctctaggctggtaatttcctaccatcttgttaagtcttcgatggtttagagatgaatttatatttttttttgcagctaagttattttccatagaagggcagtctgatatttgaaagttaacattgttgaagtcaaagttctcatgatggtactttttaacaataatgaagttgaatatcttctgtactttgggttttcattttgaaactagaaggcgtacttatagtacagctttcctggagcctatcccatttgcaatcacagacctttaactcaaagtttatgcaagccacattcttctccttattcctaaaataagcctagtcttagaatgtacaatgtaaatatatctctccttgcctccaaggaatgtacataaccccactaagacagtcatgcttccctatcttttccatttactaattttgccaccatttccttccactttcagtgtggaatccagttgctagtgcccatgactatttctcaacttccaactttcagctttcagtacactacgcaccatgatctcctgactagctgctttcttcattcttgcctctgtgttccagaatattatttaggcagaatacataccttacagtagcttcatcacatatctatagtttgtaaattctagctgaaacatcatttgcaatcatttttattctcaactctcttactcaaaatattctttttcaaaagttcatcctattttaaagtctgttaactgtaactcgaagtaccctatctctcatcaattaacacttgcttccttttagaaatataagagaacctagagtgaatctagttgaagtcctttcttataaagtaacctgtttcttctctcattcttgattcattgttcctgtttccaagaaagatgtatttctgcctttccaaagggtaccaatctaactatactcttaaattattgagtcttatcttccatgtattctcactccatcagtggtccttctcttgtatcgtcaatcattccatctttaccaacctcctcctctcaaactataagcccttaaagtatccttcagcccagaaagcaaaacaaaatgaaaaaaaaaatctgtattgagtgaatggcaatgactgttccatttaccactagctttatatgctggcaggaatcccacatgaaaattaagaaaatttattaggtagtatgattttccttacctccaaagaaaattctagccagagaattgataaaacctctaatgctatataattaaaaataactctgtaggaaatagaagttctcatgcttggcactacatgcagacctccagtatactctccatttgctcttcaaaatgtctgacttctagggctgacttcatgtgtaagtgcttcttgtcaatctgttagtatttgaaggataactagaaggatttcctaccccagcatcttccctaaggattcaaatttattgttttgttttcatccctttgatcaaacattatggtctcctctcttattgtttttaattcttctaggagaatgtttctcaaacctaggcatctattggaatcacatgtgggacttaaacaaaattatgtgcaggtgccatcctcagaaattgtctgtcttatttggtcaggggtggactcccgccattgccatttttaaaagttctcctggtcattgtaatgtatagccagttgaaaactatattcctagttgagtgacatgcaagtacactaataccatatagcaagaatcagttttcttaccttctttttgtgacattcctgtgtggcattttagcagcacgtcctgagatcatcctcctgaaaggagaaaaaaataatcaagaggtaagttggccataaaattatccaagttttactgtgacctaatagtaataataggatatgaattattaccataattcacatccatatgagaaaactctttcttggtttgagaaaacgtgttttttgcctcccagtctggagaaaacatgttgcgttcctctggcacatgtacatgtttatgcagatccattccctagaggaacttccaaataaacggagcatattatatatggcaaccgagaaacatagctttatgttgcctgttgtagaattatttcatgacattaacatttttatgcacccccatattaagttttatgcttagatttaatgtcaccaggtaggaaccaaggtaaatgccacatcccaaatccacatagagtcagagctaaaccatcagttatcaaatctgtctttttatgtgctgtgagatttatacacattgctttagaaagctgcattcactggaagatgctggtttgtggaggggcaaggaagtacatttacaggttagcttggctgaactgtgttgatttctctgcagaacagtcttcacaattctttgctcacagttaaaggtctgctgaaagtgactcagtgtagatgaaaacagcttgcttaatcattcctgaaacacgggaaaaattaaaatacatttttttatcaagcaataaaaacaatgccagattgttaatgcctcttttgtacctttcacttaaaagacctcaaaaagaacatcaaggagaataaaggcaaaatctattccccaatgccgtcattatacatgttgaagcctctaaaactagaactctaaagacattcaggaagagcaggggaataaatgacagcaaactgaagagtgcgtctctggagctttgttcaacctgctttgttcaaattcattcaaattggataatgaaaagcaaagatcttttttgtttcaacattaaagtagtaaattagtgagtggtgagttgctaattgttctgtaaagtatttaaggtgccaggagtgtcccatctccaatttttaaaatggcatccttatggttgaaatgaaaggaaccattagagtagtgtaaaacaatgtttttaataatttatgctggttcaattgaaatgattttcatttagaaatactcattgaagttcttgtttttacttgagataagcaagttttattttagacttcaagatatcaaatagaaattcattttccggatggggctaaagtagaaagatagattagagctatccaatgttgtgtttcaaatctggctgtttctacttgctttgaaggtatagaattagcaggtttggttaaattttacttgaattttgggtgaccttttctaatcctgactgtttcataatttagtgtcttgaccttcgttttccatagagccaccttagtgataaatgcagagatttaataactagaaccagttgacaggtgacctttcgtacatggctgttcctttttgctgtggaaaccactgttttgcaagttttattatttcacaaattttaattatttattctattgtctataagcttattcagagagaaaaaagtaaaggttaaatattacattattcttactgattaaaatgtaaagtgcttggcacttgtcccaatatatcactcagaaaggatagggcaatttgtcaggttcatacccaaagaagagaaagggatggttttcccagggtggttggtaaggatgaaactggcctaggagagtgagcaatcacatcagctaagtgaaggtaacagatgtgtgtgtgtgtgtgtgtatttgtgtgtgtgtgtgtgtggtgtgaattttgaatggaggaacagaagggttcttttactgtatgtgtaccaatttaaagagaaaagtgaccctgagtcaacgagaggtgaaacttgccagtcagggtgaataacctgtcagttttggccatttctctctctccctctctctctcactcactttctctcttacccaggaaagaattggttaagcatatcatggtaaattgatttctggaatctatgtcaataaaatatattgtttacaaacaaggaaataaggctgagtaattataaaaatgctagagacttttagaaagagttaagaatatctacactttccccccaccctacagtatcagagaacataggaccttcacagggaatcaattcctctgtacttacattcttcagtatttttcagaacaattcatttgtatgcctctcaaatactcatgcttataataaaataaaaataaaaacaggcatggtataaaaagacccatcgtgtgaacatagtaccccagtcagccattgtcctggatcctcatagaagagaagagccattcatgagttagagacctcttgacagtcttcaatgaacattgattcccaaggacttgcaaatggccactgtgaatttctaaagtgaatttctgaaggaggcttttgggcagtggggaggtattattccctttagtcctggagaccagtttagaaaataatatcatctgccatggtcttttttgcccgacatggacagtaattatttattgcttgagaatctttcactgctgttgtgaaagaaacagtttgaaaagcaaattgagtaagcagatgtgaaggaccatttaaaagctaataaaattggtcatgattagtttatcttagactgaaatttcagccatatttcaagctgaaaatatcaacaaaaacattttcaataattttttatgtcatgctagcactattgccaaaaaggaatagtggtgaagttattgattacaagcatgtttaaagcattaatctatgatttaattaaaataatttaaatataatagtgagcaagatttgaggtatctgcatatatgtatattaagaatagtgaaaatcagtaataattatttctttgatattccacatttcctaatgctgctgtgagtgcatttcctgaaagttaacatatgctcttctttttaacctgaaaaatatctagtatcctttggacatcatgtttatctcaacttcctcaactcagtaatggaaaatgaattaaggtaacttgaaaaatctgccatgaaaattatgtggaataatgtaataaagtactgagaaatatgactgacctgtaataggcattcaatcatgtgtatatcaaaaattctactacactatacttataggtctctctggtgctgtttcttcccttcctctctctctcaccttctacctgtgccccagccaataatcaagtcattttttcctgtaaggtggcaaaatgtcgagattcattttagcagagaaatgacttgttttacaaagccattccttaggcttctaaaacagcatacgaattgactctagttgatcatgaaactctcccacacagcttagcgctgtgtgctgagattaagttcacactgattagaattttaaaattattttactcttcacagtgccttgcacagaataggtactaaataaaaattatgtggttattcaatagatgtcaccaaattcttaactcctcccaagctgattgttttgaaaccagatgtgctggtatagagttagtatacttttgcagaggaaaaaaatagccaaaacaaatacagtgctgttaccataaaagaaaatcaatattttagaccttaaataaaaggaagtgtttgacatttgtggctttctttaacaaggacatagggacccagacagggttggctgaatatttgtggtgctctcagtttatagacacagctgaagcccagtgaaaatattttgaatgtacaagatgttttcaaagatgctttgagtgcacaagagacaagatgaagaagacaagtttgtttttaatgaaaaaaaaaaagcaaaaaatagagacaattcaactataaagggagaattcaaaatttagatgtggcttgataaagtggaactagataaatcttaacaaagttcttggaaaatccaggacctcagtctagaaagaaagagtaactgcctactgaagcagaactgagtgagtgaagacatatggaataaattttcaagcaaagcccccaaatcaaataatatgaatgagttgaagaaatagcagtacactttaacagagaaagttgagatcaaaagacgtagtaataaagctaataagaaaaactgagataactagataagagcagattttgggtcaaattgtccatttgtgcctaggtatttctttctttttgtcatggcatactgtagtttgaaggtgccttcagatgtataaatgagtcccttgggctttgcaagcaagctttttgtgctacctgaagctcctgattatgattaggaatgttccatttgtctggcccccacactcttgtcatactttaaagatggttcctgcaagtaagtggtaaaatagagcaattatcatgttcatccatgtctcctggtaccttattcaggaaggcagatggctaggcaaaactattacccagaagtatagaccaagaagtacaaacgtctcttaagatgacggccatggtgacagtagggccaagtgaatagtcaaacaaaaaaacaaagtggcaattttatagatcaccatctaccctcaaagccgttgcattcataatactctacccaatgacatatttgtcacataaacaagaggctgttgttcccaatgtttgccctcaagttgttagttagctgctgacctcataatctgcacagctgtggcatcccaatgtgttgtcatgaaacagattgtgatgtcttaattgatcactttcagaggttacaattgtcaagtgagaccagtgtgctggtctcacttaattctatattaagccttgttacagcaaaactggctaattcattataatgactaggaaatccaatgtaatttgctgcattttatagatttgaacatatccaagactttctttttcttctttttgattgtttaaatttgtggaggctataccccaaccatgcttttattacacaacgaagcaacttcttggaatagcaaatggaatgtaaccccccgcaccatatgcatcttggtgataagttggagtatgccatatgatacacacaatttaaatcaggcattgatttgcatgactgtaagtgaattggaggactcagctaagagtaatggatgtcaggctctgctgcaagccgtctggcaagaagaatattatgttcttctctattgtgtaaaagaaggtaggctcctaagaggttgaggaagggtcttaaatcaatgcgtgaccccaaagggcacttccttgtgcctccattttggtcactggtgaagtcttcactatggcactaacctataaaactctcttttccaagtgtcctaatacactcattcaccttgtatggatctattcccatctggtgcctggaccacctgctactcacattagttgagaaaccttactgtgttaggggtgatgaacagtccctttaataacagagttttaagacaactcataaatgggcctttgtgcattctgcaagtcaagtttttttcaaaagttttatctttgacatttcaaataaacacatgcctttgtcggtctggcacattttataggagtacaaataaaaatgaaatcaaagaaactaatttaagttaatgtaataactgttagcatccaaaatgcaggaggaagaacaagcatgtttatcaaagcacttttttatagtagaaaaaaaaacagataatagctaaatgcccagcagtaggcaaatcggtacatatggtatatccctataatggaatcttgtgcaggcataaaactatctctaagggctgacatgggaaaggctgatgatttttgattaatggtttctcattaagtaagaaaccaaggtggccaaagaatataaatggcatttctcaacctgtctaaaataatatctatagaaaggaaaaaaatatgacaaaaatcggtgtagtgttattgagtgatgagaatatggagaattttttaaatcattttgtccattctttttagtttttgagtttcccatattactttactaattagggggaaaaagtttttaaagcagtttgagtagtttcaattcaataggctgtaccttcagaatatttccagaacataagcggcttctctccatctcctttgctactcaacatggtccacatcactatcctctcttgctgggattgtagcagcggcctaatctcctgcttccaccctggcctcttttttttatcaactttccacacagttgccaaagctgttaaaatgtaactcagctcagtcattcctctgtcccgagcccttcaatggcgcttcatctcacgcaaactgaaagaccccaagtgatttctcccctgctatctgtctggcctcagtacctacttggctctccccactggctctgccaggctacattgctcttcctattcctttcctgcctcagggtatttgcattggtttttgcatttgctctgcaggaaagcttttttcctaaatatgctcatggccaactctttcacttcattcaagtctttcctcaaagattattttctcagcaatgtctttttctggttactccaccaactctctctctctcacacactcacacacacacgtgcacacacatacctcttaacctcctttcctgctttaattttctcgatttagtacttagcaaaatttaacatattatatgggatgatagtttatttattgcctttctcctgcacccaacttgaatataagctctatgagaacaggagtttttgtttatagttttcactgctgaattctaacccctggaactgtgcctgacacatcgcaggtgctctatgactgctgtgagtgcctaccattgataggaacaatggtctgttacagttgtatgatgactaactggttgatttttatgcagtatcttacctctcagtgtagttattttaattcaattgctttcacttcctaacttaaccaactgagcctttaatgtattccagggactgacgggggaatggagttaaaatgaaaaagataggcattgttctgacatagtttactgtctagtggacagacataattaaacaataaagtccaacacaatacataaaacaaggatagtacccagtcgagagaggctactcaccaacaggcacaataaaaattcaagatcgaatgtcagatgcaaaatgtggaatctcatagaagggagatgagaaagatgtatatcaaaaaagcacattgcttctttattactgttttaaaagaaagggtgactatgtgggagagaagcagcaaaagcaatctatttggttgttttaggagaactgaaagcaaggaataacggaaagggcagtgggcttagagttagacgatctagatttgaatctaacactgcagctttatcatctccaagtcctgaaagctgatgcttaacttccacgagtctctattatctccgtggttaaataaaaagggagaaagggacttagactaactatagagactgtctgtgtatataccttcccatctaaaaggaggcctttccttatccatctaggataaacataaacacagacgccaattaatatgatgacttgagggaatctctgaagggtctctgtaatatttctgctagcctgggacttaccttaagtagttactggttctgaaaatctgttttataacctcattgcttgctgaactcttcatatttttatcaattgctcataaccattcatgcatacaggtaaaatacataattgatccctggatatgtttcttttgcatttcctttatagccaccaaccttattacaaagatcaaatcttttcgtattttcttatttcacctgaaattacagttctgaataaaaatatttatcatttagagtggaaaacaaataactattttttgcctataattttaaaccagggcgtggggattatagaaattaaaattattttttgacggtatactttttcttttttaatggaagcatgctgttaacttgataatctgtggcagcgactgtaggtttggtatttgtaggtacttcagagatatttccatatttggtaattatacaatatatgaacttttgttttcccataggaacttgtttgactaagtggaatttactaatttacatgccttctttctctatttttcagcctttgcaactggactgtgacctttgtgccatagtgtcaaactcaggtcagatggttggccagaaggtgggaaatgagatagatcgatcctcctgcatttggagaatgaacaatgcccccaccaaaggttatgaagaagatgtcggccgcatgaccatgattcgagttgtgtcccataccagcgttcctcttttgctaaaaaaccctgattattttttcaaggaagcgaatactactatttatgttatttggggacctttccgcaatatgaggaaagatggcaatggcatcgtttacaacatgttgaaaaagacagttggtatctatccgaatgcccaaatatacgtgaccacagagaagcgcatgagttactgtgatggagtttttaagaaggaaactgggaaggacaggtgagccctctctgaagcagctttattgtcttttattatcttttatgctaaatcttcgccaattccttttgcaggatataaaatgaacagttatttatttacgctgattgttatatgttttgactattatgattacttgataagccagcctgaggtctcatttattccacctatactacctcctgttctttccattctgattggtttgagtctccaagaaacactggatacttccccaaggtatcttttgatctttttttattttgttccatttgctattgattgagttggatttcagctgaaagaggaagcctaaacatttctgtttcaaaacctagtaatggtaaggaactttaggattatgcattaatctaaactcctctgggaattttgccaaaattttacctgagaccacaaacagaacaggctactgattctccaataagattgtgtagcttcttgcatgcaaataggcactgtgatcctgaacatcataacttggtatctaacttgttcagcagaataccatattgaaattatacgtcccttaaaatcattagcagttgaattattttaaagaaatgaggtataaatactattcattcaattatccaaaaaccaatttgcattttttattacatccatgttttttctgtagcattctgtaaactacacttcgcacttttttcccttgaagcctgctttcccctccccttccttctcctatttcctctgtttgctccatttccagctccctcatctcttctgtaactgaattgtgtgccatgttttctttctttttagaaagataactattaaaacagagaaaacaggaattacaaatcagacaatcttagttcttatatctagcgctaataaagaactgttaagggaagatattgaaaccaatagctaaagttttaaattatctgtgaattttgcttatttgtgcaatatcatggataaattgagcatctgctatagttccaatattagcattccaattttttcaaaatgtatgtatttcactattcaatattatcaaatctaagcttttaactatattgagctatgtgctcagggaggtgcagtttctgatatctctggatgtaatttgaatgctgatgattacttaaaaaccttaggtggatcaactctcctttggtaatgtgggttgatctgaatttaacattttctacttctgagcaccaaaaatacacagcttcatatgaaatacaagacagaaatagccatgaaatactagttcctcggactgtatgagttagcaagaagaatcccaagggtgagatttgaatcaatgtagcataaactgtccaaaatgacaggcagtagagatgaaagggataggtatggtgcttcaaagaaaaatggtcatatgtcacattattctatataaatatgaagcctattcacaaagggctttggaaatttctgatctctccttagcccagagcaatgcaattaatgaaatgtattttggtttttcattagttagagttagccctcagggtatcacccagacatacctataagccctagagtcatttgcggggaggtatcagagaagagcttagcatgctgttggttcatgtttttatgtgtttatttcacattgacttttgccgtgagctttgagggagacaacaccatcacatatgtgtaaattgtaaaagaattgggagagaatagctttgggagatcattttcttactggccatgatgaagaaagctgtatcgtaggaaaattactaggtaattttactcacttgataaagttaatttgcaaggtatcattcgattggtagagttaccaaaatgagagttaaagaaacagaaatatggtttcagtttatggtgcattcttatctttttcactgagtctatttctgtctggttgcttcacttagtactccaaccagacaagagaagacaactatgctagtgttttagaaatggacagaatgggtgatttaagtagagcctggttggataataaaatgttgatcaaaatgacctcagaagctgctgttcccaatctatatcctaaccccatctatgttaaagacttttattgtctaagaatttcccatgacaatctgatattcattgtcaaatttcaaactagaatatatttttcaacttttcatgaaggaaaatgtcaaacttatagagacactagtggtgtaatgagcctctgtataaccatcacttagcttgaataattattaattcatgaccagtatggtttcatctatacccctacacactttctctctcaccaaagactatgttgaaacaaatctcagatatcatataattttatttataaatattttggtgtatacctctaaaagataaaaagtcttaaaatcaatacaataccattgccctacataaaaatcaacaattctgccttaatatcattatatatttagtttgcaaatttcccaattgtctcattgatatatttttcatagtttgttttaattaggattagcataaggtttatacatagcaattgattgatatgtgtcttatatttctcctaacctatatagaaacttccctgtctctccttctctcttctatctccctccctgcctgttgttgaaaaaacctaggcattagtcgtacagagttttccacaatctagatttgttaatcacattcccatgatctttctttttctgctacactggtatttatgtattgaggcttggttggattcatgtcttttttttttttttttttttttgccaaaaccattaggtggttcttctctcagaagaaatactctctagttttctctttttttaatgttagatgccattaatgattatttgctagattatataatgtattaggattgcacaatggtgctatttcatcttatcctttttatttattagctgatatattttattaagagtaatttaccctcttattcatttggttaccatgagatagaaaccaatcctgttctcctctttatttaccagttttaatgtattagtttccttgcattctctataggcgtccactattattaatatttacatattgacttacagacttaaacatacttgaagtattttaatttattaaaattatatccttatgctcagattgccctattttggcctatgggaacctcttcaaattggctttgagtccttttgacatgcccttagtagtctttgatagcttctttgtttcctggtattatggaatgtttcaggctttttttgtacatattccgaggcagacctggattcagacatttctgcaaagaacgtcagtttcttttagtagttaagagagcataatattagcaccattgctgctcattgctactggattggtctttgtttcttgggctttacagaggacagaggtagtatgtaaacaatatatactgtgtatattgtttaaagataaaatcgttatgagttcaaaccgaaactttcaattcaaatccagggctatcaggttttaagtttacatcctctatcttatatctgttccttctttttaccatgctgacaatcacaggtctcagagatttcaatgtaattattcatctgctttattccacaacacacacacacacacacacacacacacacacacacacacataatcttagaataagaataacagcacaacaagcaatataattatggtaaacactttaaggatattttgcatcaaagaaaacatttgaatggcaaacatttatgtggatctgtgctcacaaagtatatgttggtaatagtctccaaaaaagaacatttttctcctaagtaaataggagtgaattaagtggtatacatcactgaagtcatgaggaaatagagaataaggggtgtccatttaattttgctttaactgtaaagctattttgtttgatttgcctgtagttattagaactttttagcaagtagttattttcatcatcaagtttttaacagagagacaatgtcatcattattatgtataatttatagaattaaaaatatgtcactagtagttaaagtgattcatgataggaaaatgattacatggagttcctcaaagaaaactttgcttctcagcttgcttcttaaaattgtaaaaatacttaaaaaaaaatatagcccttccgtttaaggtaggcatcttttcacttttccaagtattgtgggttttgttttttttttttttttttgagacagagtctcactctgtcacccaggctggagtgcagtggcatgatctctgttcactacaacctccgcctcccaggttcaagtgattcctctgcctcagcctcctgagtagctgggactacaggcacgcaccaccatgcctggctaatttttgtatttttagtagagatggggtttcaccatattgaccaggctagtctcgaactcctgaccccgtgagccatcttccttaggctcccaaagtgctgggattacaggcgtgagccaccacgcccggccagcattgtgttttttttcttaaggaattcctcactgaggaaacatgaagcagtagaagaaatatgtatatcatttaaatgtcttagaataagtttaggccaactcacaaacatattggaatacctttttgaagcaaatggaatttaatttgctttctttttagttactgtctaaaattatttggcttgtcaattagacagggtgaccttgtgggaaaggctaagagagcagatagagtaggttgctttccctttctgtctttatcttctggggcccagttgttttttttttctttctttctttttttttttttaattctaggttcattggttagtggtcacttttagattgtcacctaccaatatacttctggaaaacaagtattgtgaattctacagaactttcatttcttccagaaatctttgaaattaaaggttttatattcaaaacaacctggaccaaaataccttttcccctttgaatgattggtatgcataaataatactagcctgctgacatttacacatttgcattaatacatcttaagactgaaatatgatggaaatgctgtagggctgatagtggcacattgtgccacacttaacaatgaagaatgtgatcatgttcctggcacacacatatgcaaaaggaatgttaacttttctagagaagcagttgagagccaatgtgagatattctgctttcctatgggtaggtgggcaattgcagcttggatttcactttagaaatatgcttgcaaatataggcacattatttaattaagtaataattgagaaagcgatagtccccattaaaagagcaaagctaattctgggctgttaaaggactctgagctgccctaaataggtcttaattagctggtgccaatgtggctccaccttcagggatggatgaaattaatgaaagctagcagcaaatagaatcaatatttcaagatgttcctgcctcaggtgaagaggatgaaaagaaagggagtcattttcaaagactgtttaggaaacaatgcacataaatcaatttctaaaaacataaaatgggacactgatttgtgaatacagtatcaagatctctacctggctcatctttgccagcctgttccatccattcccactcaatcttaaggagagaaaaagaaatcagcgatgtgtcattcctcactatctttgggggtgacagttttataagctagcaagggttttaagggcagcccaggttttgctatttcagcttggccattttgaaagtttcttgtgtcattgcgtggtcaagtgtagagatgaaattggctctcatccctcaggtttgcaaacctttagtaatatctagagtggaaaggggtttcaagtcttcttccttgaaaatttgggaatcctcttgtaggtccctctgtcaacacacaaggaagccgccttaacacacacagtgtagcttgaaggtggagggcaaaaaccaaaaccaaaataaaacaactatgctagccatatcttagagtcgccatggggtacagaaatgtgcatagtttgcccgaagaaatgccatacctagattccacaaacaaagatgtcaggttattcctaactcagaataaatacctgctaaccccaggaaaacttcgaccaagagataataggcaaaagacagtattaaaaacagtattttccatttttttttcattttgaagatggtctttgcaaatataagtatctcagcactttttcaggagcaatgctgacaaacctctgttagaatgaattaatatccccatcccagctggtgtatttggcaggaacaaaaagttcatgcagcagtcatgggcagatccataggactccttagtcaaaaagcataatactgcattcagggttgtgttttcacgctaacaagcattatgaaacaggggaacttcctttttaccattatttatgatggcattcagtgacctacattaggcctcctctgtaatacaaatgcgctggaaattaaaaattcaaaaaaaaaaaggaacgatctattttaataatgggaggtagggaagggcatttgtaatttataaagatatcagtacaaacctttcatgtgtttaaaaacaccctcatgtgcacacacacacacacacacacacatatacaaatgcactgggtgaaactctgatgtatttgacaagacaatttaggattaaaacaagagcaacatctcaagttcagtgatcatattttaaagcaaaaagctgtgcaggacatcagtggttgtggaaatcaagacttccaagcagtctactgagtgaaataaagttctctgggccagaggatgacttgacagaaggccagattctcagaaaaaattatactgtatagaaaaaaaatcccagtagacatgtatgctcaacagttctctagatgtagtggcttttaaacccccaaagggtgtgaaactcaaaggcaaaagtaggccttaaatgggaagcttcattaaaatgtatacagacttttaaattttatacaggctttaaagggtttatttatttatgcatcatgggatctatctctgtagttgacttacttctctcttacaattatttctcctctccttagatttttttttgacctatgcctccttcttcaagtttagttcaaaattaagacaagtaaggatagttacattcttgtctttaaaacatatgagccagcagcaatctctgttttttctctattcttggatgcttgactctttttaagacagagttggttgttttgaaaattttcatcctatactacgcccatctgtactactagatgtttaattgcttgggcaaatatttcaaaatacctttcactgtgtctgggatgttataagagctctacagatgtttgccgaattgaatttttgcttctctgtaaacagacttcttattagatatggtattactgacctacatggactcctctagttagctctttttctttctttcttttgttcttgtttgttctttctttctttcttttttttttttttgtttgtttgtttcaaggagtggaaagtttaataggcaagaaagaaggaaaaagctccccgtgcagagacagagggaggggtgctccgagcggagagagaaaaaccccatagctccttttcttagtgaagagtaggtcctctagatcagtacagtgcttttcaaactttaatgtacatcaagccacctgctgacccaaatgatttgaggcagggcctgagaattttcatttttaacaagtttccaggcccggccatcctgttcatctgcagatggcactttgaattatgctattaacaaagtaaaagacattcattttttcttgaaccaaataaatacacaagtcaagaatatctgtttcccaaatagctttgtaatctgcttgtagttggatcctaactttgtgatcctgccctattccttagcaaattaataatggggctcagagaagtccttaagaattcaactggagacttgtgtatctgaattgtgtttatgtgttcatttctttcattgaacaacaacacatgtcctaaggacagggactacacccatctccattttattctcagatctagcatagcggtggttagccataaaatacagtaccaaaagaatgtattattttcactctctgtctttcagttaaaggggccatggatgtttcaagtgtccttaaattgacctcagcagtaactccttttctttgttctattattatcactaccactgctctagtttaggccttctttacctcacacatacgtgactgcttatctagtcctacctctatgttttggcagagatagttccctctgcctaaattgcacttccccctgtcaccatgcacacacatgcaggccatactttatgaacaagtcaaatgttaccttttcatgaagcctcttgtaatatccctacagaattcctacttcccctgaaaatcgtagggttatggacttccttgttatagaaataataactttctaccatgcgttattgttatttatgtttaatctcttcaagtggtccataaactatttgagggaataccagccttgtttctccaagcaccttgacataatgcttgactttaataggtattcagtaaagatttaatgggtgaatgaataaataaatggacgagtaaaagaagaaataacacttaatatcttttttaagcttaaaagtccctttgccattgttgaaataccagtgaatttcaaaatactttttttcaacaagaagggtcacagcaatgccaaagaggcaagttctaggattggattttgatagaaaagtttccacagttctatttagagagaccacgtcttactttactttacccaaaggctggcaaatctattaccttctctagggattttgtgattgggcactgggtttttaataagtaactggcagagccattcctcaaatacaggtttccattttagtttcacttcagttgtgaagcaaattccaaggcttcactcacaattctgttagctgtcagttgcctggtgagaaagcaaatcctagtacccaaagtcaaagttatactcttgggcttcaggaggcaaatataagcaccaccacagaagtcagaaaacaaaatacccaagtaaaggagaactgaaaactctcataaaacaacctgagcttctctaccaaactttaaattgccctccagaaaatattttcttctttggtaacaaagaaaataaattgccttactttttaaatgccttcatgatgaacataaagaaaagaaaaaattggtagttgtgtctttcaaccaactgcataaatgaagaataaatttgtatatagactaagaggaaaattaatgaaagcatttctggcatattcagatcatgtcactctcctgctcaaaatcctgcaatagtcctccattttccttagaataaaaacacgtgtttacagtgacttccaatcacttctgatgagtctaccatgatagcatttaaaattgaaatccttacctcacatacccagcattcccaattttccttaccttgttctattttatttttttctcttatagcattaccttctaacattctatataatatacttatttattttaatttttagtgttttctatgtatttctcctactgggatatgagttctctaaggccaaggatcattgttttgttcactaatatatctcaagcacctagaagaatatatgttgtgtagtagacactcaatatttgctaaataaatgacctagaggtggaaaaacaattgaataaaggattcaggcaaacttgcaaaaagttatcatgggggtctttaatcgcttaaagaaaaaaatgcatccactcagaaacagtgcaattaagttacaagtttaaggctgttttttctgctgttgttttacaaaaaggtgctagtattgaagctgtcttatccaagagatcatcattgcactcaaggaactggtctgactgatttttattcttcaacacatggaccagttgtttaaacagaattgatttctgatttctttggtatccaggggaaacagcaaaaatgtctcattcttatttggattagtagaacagcggttctcaaacgtgagcttgcatcagaattacaaggggtgctgattaaaacacagattgctgggctcattcctggactttctgggttggtatgcttggattgaggcccaagagtttgcatttctaacagaattccaggcaatgttgctgctggtcctgggatcacacttcaagaactaccgtgataaagaattctaagatatcaagtcacattcaattattttgaacatttggtcctataatctttattctattggcatattgttgcacgaacatctagcactatttttgttatgatatttttcacggcgaggagttttttaacctcctgtgaaagtcctactgcaactctgtcattttattcttcactttcttaagatcttgctcctctgtaattataccagatggtgctgctcagtagcttataagggagtgatgcttcatcattctagacagagagacaaatcactctgttctctgacttttgaatcaagaatcaacatttgtgtgtatgttcaacctgctatttgctttgcaattttgctcattaggtatttattaccctgacagtgtatgagttagtcattttccttctgccgtgtagttcagattagcactgtttgacaactgccatcatcacagcattacctccaataatatgtaatttcttttttgcctatgttatctgggtgaggtagttatctaggaagtatatctacaaacggaagatcacaaacagcattcagttctctgacttatcatgttagaaatggataactagggccatttccttggagtttctagccctgcgattggcattgctgaaaagaaaggaatattatgaccaaagccaagcgttctttttcatttattgtatgctttttttatgaagaaggtggtatgagggaagcatacaatttaatgagaagcattgaaaaagaacagaaacatttattaagctctactggcaaaatggataggcaaccctttacagaaacatggaaaccatgcagagcagagaactggttaaaatttagaatgtggaaaacagtcttatctgagatattcaacaattggagcaaaaacatattttctttttctttataatcttcactaaaaggagaactaaagttattactagataactcatgcaaaggcactattacaggcatgtaataacattcttctgacgtgaataggttgtttattctctcctaaaatacttctctacacagttttaatattaaacttatgaaattttcttgaacttttgttgattggagggtagtagagagagaaggggatatagttgggagcttttgggaaggattgtcaatctatcttaattcttctagttgatagtagatttttgaccattaaatctttactaacaaaggtgttaatatcctcgtaatgaaatgagtgtcctacactacatcagctgtatcattgtggaggtacaaaagctccgaaggtaaatgcaaaacaaagaatggttgctattccaaggtgactttttcatgacatgttctatatttctgatatgtcttctagtcttaacctgtgagttcatagcaaacacagttggttttatttaggagtgcattaaattttattccattgagcaaatttcacttttgcttcatagtgattgtaattaatttgctctttatcttctctttatctttacttcactcattactcatctgacagctcgccatcccatcttaattgggagagaagacccttccaaaagtgaaccattggcagttctgtcatctggaaagagatacataaaatgtgttaagaaacagaaatgactatataactggttcatcatatttccttagcaggtggattcttggtgggcaaagatcatgttcctggtgcttttgctgccaagcacattgtgggtgttcaataaatattaaataataagaagagtttcctaattaagatgaacatttttctctattaagcagatggtgctcaataggagtaacccattatttataagtatgacacaaggtgctggcaattgttgaggaaatgtggctctcacttcagatgctgattatatgttaaagcaaacttttgtgacaaacagcttggtcgatattagttaatgtttgtgattaaaactgttactaaagatggacttgtgtatgtaggtctgtaattctgctgttttgattcttaatattggcttcacctattcaagtatttctggctatttgatgcaaggcaagtttgggcaaatcagtgtatacctgattttaccccataggttcaccatttgatttgaattctcatccttgtctgatttctaaagagatttttgttttgagtcctttgagtctctttgtggttgctaaagctagatgtgaacacctccgtgatatttgcaatgcttatattcgtagctgaaatctcagtggaactaaggagagttaattaggcattcccaaaaatacacatcgttttatgattttgcagatcaccccgatgaaaataacagtttaattttgtcaagtcatgtaaattatagtgagagggatgatgagagttctcagctctttggagaagttaattttgttgtcagcacatccacatttcaaaaatcacaaactagaggcagaacttttcagtgccagtgagatttggtgatcagatactgttttcatttctaatgtctgccttctgtatagcgcctatgcaaataggggctttcaaggatgcaaaagtagcaacttcccctattaggagcgtaactagcagctgctgtgtttctcataaaagagaaaacatcctgtttactaacatacaaccatacgccctcacccgcgtacactcacaccaagctctttttttaaggcagagcttttattttggtttgagataggcagcacagaaatgcagtcttttacaaacattccttgagcacatatcccctgggtgctaagtaggtgtcagtcattgttctagatgtggggaatccactgatacttgaaacacattctctaattttactgggaactcgtcggaacttctgacattcattggcaagttctttgcatctggtctcacctccttatttttaatatttataaaccatgttcatcaggatgtcagtagagaagaaatgaaagtagctgagaaaccttgccgagagagaccaaatctcaaagtgaactaaaaatgtcttgaccacaaggatagaaagtgaactaagatatgttcttgaggcagcaaaaataagtattgtgccaaaatccaggctttacctcagtgtcagataatcaatggactagagatttcactgtgttgcccacagccctgttaagaaatcaagaccatgtgctttgtctataatcctggagtcagcccagaagatgagctcataaatatgttagcttaagtaaagtttatgataatatagacgatgaatcatcttcctgttttgaaaagcatatattctataactcaggatttctggagtccctccagaaatctacatgacttttgccccattttctttaggtcttgattcaaatgtcgccttataagagagcccttttttgacaacactctcccacccccaactctcccttttctgcttttcaaactctattttcctttatgttacttgttatggcctgatatgtgtttgctattttctgtcttcccttattagactgtaagcaccatgagggcataacttgttgtttacctctctgccccctcaaatagcatctgacacacataggtgacactacccagttgttgagtgggtaacatgaggttgtttgggattgttagttcattatcctaggcctacacagggtcagcatcaccaatatcgctgtcttccaccttcacatcttgtctcactggaagatcttcagagacaacaacatgcatggagctgtcatctcctatgatagcaatgccttcttgtggaatactgcctgaaagacctgcctgcagctgttttacagatatatatatatatatctgtacatatatatatatatagggagagagagaaagagagagagagaatgccctctaaaataatgatgaaaaataaagtaaatacataagcctagtaacatagttgtttattatcattatcaagtattatatactgtacataattgtatgtgttatacttttatatggctggacatgcagtagtttacctaaaccagcatcaccacaaacacatgagtaatgcgttgtactatgatgctatgacagttacgacatcagttggctataggaatttttcagctccgtttataatcctatgagaccatggtcatatatgcggctcatctctgactgaaatgtcactgtgtggcacatgattgtttaactttcatgagagattctgataaccaggggaacattgaggtgatataatttaatccaaaaaagtagatgtttcaaataagattttgtattgggtaaataaatgattactgtttggctttttggaatttcatgcatagctcaagaatctctgttgccaacttcatggtctccttagtggtacagagatctcagcaaagaaactcagaagtgagcacaacacacttatttaatgggtaaggaaacctaagaccagggcaaatctagtgactttctcaagtcccacctcttgtagtgaaacttcattcatggggtcttatgaatcctaggctagtgtcatgtttactggctcacaaggactgccaccattgaattgagcaccaggttgagtatttctcaaatgtgctctggggaccatctgcttcagaatcttctggagggttctgctagaaacatagcctctcagccctgtggattcagaacctctgggaatggctctgcatttaaacagttccccaagtgtgtcttacacattcctatgcctggagaaccagtgacccaatatgtgcaaggattcttgattctcctccatggaaaaataaaaaaattaatcgtatctccaaactatatgagtacatatctatcgagaacctggaccaacagtttttcttggggagggacactggtccatattaaaattaggttagttttaccatcaagttggataatatgagctactttgaacttttgggcttaaatctatctagttcattaatttctgccacaaaatttttaagtgcacattgccaggaattcagagataactgagacaaccccattgcagttgggggagacagatatagtttcacagggctacagaaaagccccgaagggcctgtcttgtctccatgtgagacctcagaaccatgtaatgcaaccaaccttagttgcatagtaagtaaccaaccaggtgtgtatagtaagctgcattcctaaatgtctttctatagttctggacatctctctaagtccaccaaatagtctcagtcttcacacaaagaatagtgaggagatctgtttattctcagagttagtggacaaaagcaaatattctattagatgttattagtattattattgttattattttcaggacctacatccagccccttgttgccataatcgctatccaatcacactgcccttttcctttgttataataaatttctcccactcttcatcatctttgaggatgaatcatacggttcatcagcatcttacttcctgacatacaaccctgaaattgaacaattcaaaaaatttcccagaaatgactttgtgggattttaatctaattctctgaatggtgaaaactctttaagacatttttcaaaggccaggtttttaaatatttcataccatggaaactgtcttaggaaagagttggggacttaaggtcacaaaaaatgagaaaaattatacttgagaaaaccttgtaaactagaacttcttgtaagaatattaatatgttatttttatccatcttaaaatttcctcaggcgtgtgctgaatgagcctacttcatggttgtagttttgttgttctttccacgttattttgcagttctccctgtggccatcatattgattttaacactgtggtcatcattataggaaaatggaggcattaataacttggtctctgtggacagattgtaatagaaaaccttataaataattgcccactaatgggaaaattgaaaatatgcactgtattataatggtcataatgtaatcattaaaattataattatgtgacaatgaaagaactcattatgcattagtttatctttacataatgctaatagctaatgaaagtgtgacaattagatctaattaagtttaacaacatttctgcacttctcgtaaacaggctatgttttgccagaaattgtatatgcggagacattagtgataccgaggtccatctcatataatatgagttttgaaatgtaaccatcagtcctatgaagaaccttaactttataatgcctttttgttaaatgaactggaagtatgagtctttactaagggtagctttataaaaaagtttctcagattgtgtcatgttttagttaaaaataacaattagtccttcctcttctactaatctgtgcttatatatttgtgtgtgtgtatgtgtatgtatgtacttgactcatctgtgttttgtttttaacaatagaattgttatactgaattctcaagttagaggtttgattgattgatgataatgaatcaagtagatgttggtttcttgtcatagattatagcatataacagtccaccatgtcctatctgtatgatctaggtcaagtgtaaactctctgtgcttcagttttctcatgtataaagtagtgtctatacttttgttagaattaaactagaaatttataaatttcttagcctgggcatagcacatggtgctagtatttactattattagtaggaattattttatatctatatcataatatcaagaagaattccagctagtatcacttttcctccactgacattttattgcattgcacatttagataatcatccagacttttatttttccatcatttagaaaaatcattacatacatcatattgaaaacagtatagggaccttcaatatgtgctcaacatattcttcagagtggagttttaagactcttgagcactggaagacattggccttgtcaccagggtttccaactgctcaggtttcacttacagaatgatagactgtgagctcaactatgaatgactcttggccgctctcatcagtcttggatcatcaggaagcctcagaaaacagagactgttcaagtaaatacaggtagaaattggcaaactcagtcacttgctaccatgcttccaaaaagccatgatactggtctttacttttctaccattccttttattgatatatgttcagtacaaatgaaacattctctccccaagaggactcattcacttccataagtcaaccatcactgctacgtcttgtctccatctctgctatcacttctaaacattggtctctaaaactaggttggcctttaggcattttctgtgtgaaattcaatctgtttaaatttgacttatctttcctaacgaaaatgtaattgagttaccaagtccacagtcacttacttcaaaatattctttgattatatgctttgtttctatctcgaggctctcattgtctcaggtctagactatgaaaatagtctccatctattctcactgctttccatcttttgcccttcaatctgcattttatacttccaccagattaatcttcctaaatcacttttacatttcattcacctacccacaaaactctgatggttcttcattgcctttagtttcttttatctggcattcttgtccctcaaagaattttgtccagcaatttttctaagtttgttgccaactagtccctacagttgttctctggcccaaccacatgggtctgctcgttatctccagatacacattctaagctttgcatctttgctgaccctgtttctcagctgaaatgctgttccttttctactcttgtcaaataaatcatttaaggcatagctcaagagttgactttttccatgcagctctctctaacagccccatttatccctccctcctacgaattcctcaagcatttatttttctcgccctgtatcttgcacttgtacaggctagtttggctgcttcttatcttttatgtacagttccagctggccaatgggattggcaatattggaagcccctcaaggctgttttttcatctctctgtgcagagttctcagtgtatattaggtccttaacaaatatttttttatgagagtgtcaatttcgtaagcacttgaagatagtactaaaaagccttcttgccacttggttctgcctggagctgatttcatacttacaaagtaatgatttctgagccttctgcttatagaaatcgtgtaaagcctcttggtagaatgaagcatgatgccctctaccctgaactcaaagacctttttgggaaagtattattttagctgagagtttaagggagaggacagacagattcctgtgatgcagagatcagcatcacagccctggcagccccctcctcttgctgagaacagctgtttcaaatgcccattttagaagggcccttaactttccttagggctgctaagagcaagttctggatcacctgtagctgctgctgcttagataaccccagaaacaaaagcaggtgaacactgggtatgcttgcctcaactttgccactaactagttaagcttgggaagccagctcacttccaacagtctcaaatgctttatctcctctgccctaaagtgggtgaagagctccagaattaaaatttgataatttttactttatttttaaatcaaaggtagctgaaagttgaattttgattaaaaaaataaaattcaagacaaatccacctgaattttgtagctcttcatttcatagatgtaaatctatcacaaattatcattctgtctttctttctgtctctcagttcctctccctttctgtctctctcatacacatgcacacatatacacaaaatattccataaaatcagtttttaccagaaatctctttcatgctggttctcctctatgtagaaagagctacaaatgaaatggaacatgggaatagaacaagaagctgattctcttttaaattgccttatttgttttttctttgggaagtccgaatttttgaagacttaatacaaccctgccccaatataaactgtctctcgcattattaacatcccccccgcccagagtggtacatttgttacaactgatgaacctgcagtgacacatcattatcccccagagtccacagcttacattaggcatcactcttggcattgtacatacattctatgggtttatacaaatgtataaggacatgtatccaccattataatacagaatagtttcactgtcctaaaagtcttctctgctctgtctattcatccctctctctcccctaacccctaacaaccaataatctttttactttctaattgttttgccttttctagaatgtcatatacttggaatcatacagtatgaatccttttcagactagattctgttacttagtaatattacactcctttaaatttcttacttattacacccatttaaagttcttccatgacatttcatggcttgatagctcatttgtttttagtgctgaataatattccattgtccgaattgtaccacagtttatttatccatttatctactgaaggacatcttggttgtttccaagttttgtcaattatggatagagttgctataaatatctgtgtgcaggtttttgtgtgcatgtaaattttcaacttgtttgggcaaaaaaaatgttttatgttatacgctgaaaaatgctggctgaaatatgtagctaagttgcctttattgcctttttttttttttttttttttttttttttgagacagaatctcactctgttgcccaggctggaatgcagtggcacaaacatggctcgctgaagccttgacctcctgggctcaagtgatcctccctccgtagccatccaaatagctggaaatacaggcgtgtgccaccatgcctggctaatttttaaattttttttgtaaagacagagtcactccatgttgcctaggctggttttgaacttctgggcttaagtgaccctcccaccttgacatcccagagtgctgggattacaggcgtaagccaccatgcccagcctacttttgtattctcttataatgttgagtgacttaccttttgggagttatagatattagatacaacttgaagtctttttccttcatttgtaccatcaaaagatgttttcggtgttcaatgaaaattgtttcaaaaggaatttggcagtccccaggcttctacaggcggttttgaggatgaaatgtgggggcatctccattctcattatgttgatttctccttgtgacaaaaaccttttgccaccccgcctgcttcccctcttgtgctctgtcttttctctcctctttctttctgctacctgctcactctgttttctctgtatctctttgttctttctcagagctcttgcctctgacacactttttagtgccatcgttttttgagacagcctgatttgatcactgtcttttctctctccctttgaaagctttctctgttctgtgtatttcctagattactggtgatacttgtcattctggttagattttgttcctgttttgatttcatttttccgtaagatttttgtttggttgattttttttaaccttaagaaaaaaagagatttttttacttgcattccacttttctttctgttctgctctgtaacgtgagtgtgcaatatgctctaaagtccaaaaggatagttaacacagtgggtggtggggctatgcataatttctgccatctttcttatagcattctgttttctgaaattgtttcatggtgcatatgtacacataataagaaagaaaaagcaatgaaacgatttctattttgacaaggaaaaaaatcttaatgagagcctggctttgggtcttgcctctagctctccatgaaacctttttcttatctgtcttcaccaccaagcataaccacaatggctggctgagctggagatggacagcagtctgtggggattgtgtaagtgatccaatggttagctggaacctaccaaactgcaagtcatgggtcacttctgttgattccccaaggctaggctcttactgtcaattgttactaaatggaaaaaaatgcagagaaatagcactgactgccttatgaaatctagtaccctttgttcaatatgacaattagttttgaaagctgctgatgatagcagacaggggtgacatgtgataatgcttattcattatggtagcatcacactgtgattgcagcgtttactttttatctatttattcattcatttatttattttagcattcttattgattgctcttactgattactgcatgctcatttaagttgcatgacaaatgctgttatttgctcactcctcacagaaggcttcgaaaagcaaaccatggcaggtcacccagaaaccaaggtggcagggcactgaataaaatgcagccccccagattttcttccaagtggtgtaatcgtaaacatgggttagctcctttctaaggtggcaggaatcaaagacagaggtaataaactttggccagagaggaggcctgtttttacatgcttgtaaagttgtttttacatgcttgtacaatggagtgtttaaattcacagtccattgtgaacataggcatggtatttcatgactataaactgtcatgttttaagcactttggtctgtcaggctaactaaatataagcccctgtcctaaagaatcaagctcacatagtatgacaaatcagcattttatttatttgtgctaaaagcatttattgaacagctgtgtactaaaaatcctgcaacaagaagtaacattgaaatttccttaaagagcttcttctactgaggaatgtagacatattaacaaataaatacaaagtaggattataaaaaagtattttagaagaggtagctatttacaggatagagtaaagggagaggttaaagttaaaaagttaaattaaactattttttattgtcatatgaacaaaagtatcttcatgttaaattaaatacaattagctgatatttgtatgcatctgctttttatgagctgtcactagaagatgactttttactgcctttttttttctctgttttttttttttttttttttttttgagacagggtttcactctgtcacccaggctggaatgcagtggcaagatcttggctcactgcaacctctgcctcccagattcaagcaattctcctgcctcagcctcttgagtagctgggactacaggcatgcatcacgaggcccagttaatttttgtatttttagcagagacggggtttcaccatgttggccaggctgatctcaaactcttgacctcaggtgatccacccaccttggcctcccaaagtgctgggattatatgcctgagccaccgtgcctggccaccattttatattttgataattcatatttagtactctcagtcacttagttactcaacatctgagtttctttatctataaaattgacttaaacgtctatgtattcaatattcaaaaagtatattggttaggaatattttaaaatatacaacaaagaggtgactatggaatctaaaatcaatttgagaatacatataaagttaaaggtattataattcttattagcttatatgtggggaaaacaaatgattaaatatatgcatgttatgaaagaaaaatttatgaagtaaatatgtagaagctgcaaatggtgagaataatccagtgtctcctttttgagaaataaggaatattctttttcatttgctagagcaaaggttaaagaaagttttaaagacttgatattcctgtatttggatagatcatagataatcattgtcctgaatgctgagtaaacaattgaatacatctaaaaatgtgacatgcattatgctgagaccctggtagtactctctctgaataatgttatttgggcagagctaaaatgacttaactgtaattcccctaaaattaatgtttcttttttctttctgaaaaagtagttttcataggatttagacaatatttcagcataacttcaaaataataataaatttgatgtgttcatggttgcattggtaattagtttcagctgataaatatctgtggctcatagagaatagcaaccaacaacagacctatccccttatgcttcaatcttttctttttttatttttttttttaatgttttatttccataggttattggggaacaggtggtatttggtgacatgagcaagttctttggtggtgatctgtgagcttttggtgcacccatcacccaaacagtacacactgcacccaatttgtagtcttttatccctcactcccttcccaccctttcccccagagttgcttcacccttttctaaaactctttaatatggagtaaaagccaaaatcactttttttcatttttaaaacacctttgaataaaatttgtaatccaatctcttttgtattaaagcattcgaatgcaaaaagtgtaaattttgtctgtgtgtgtcagtttgcaatttcctaaactcacttaagctcaaattgctaataattaaatgagactgagttcgaagatagattaaaggacagctgattgaggatggcagtaattcctaaaggacccaaaagttcatcagaatatcacatttaggaaactgctggtcattaaggtgttaggttgtgaatttgagcctcaatggatgctgctttcttttagaatgaattaccaggtggttattgaggtatactgagtcaggattttttaatttaatgagtgctgtgtaacacttaagaaatcaaggccaacatttttattttttacctgtttgtggtgcatcagccattatttaatacattaaacattggaaataagatcttaaccaaaaatacagattttaaccaaaaacataaatgttggggctttttaaagcatttaatgaatccttagttttgtaccaggtaccgtgccaattatttttcttacattatatcatttaattcttacaataatttttccttcatgaggaaaaatatcctccctccccttacaaggaattgagacatagtgatgctgtcttgaatgctgggtaaataactgaataaagtcacattaagtagagtccaaacttagcttcatttaggataatattcaacacatttggggaatttttttaagttgttcccattttgaaaactgacataactataatgtcatcatcatttttaggaaatgaaccttggcatatcctaggaattttgttttcaatctccaatccaggtggcattctggaaagtggactgttactctgaccagacattcagcctgggtgagctttgctgtacactcagctgacctacttgtttaagggtttttaaaactcctgtgttgacaatagtaagcgtgactcccctctgtgtacctgtgatcaactgaatgtacaatattacaaaataagggcttcttcttggtttctttatgttttttccttaagtcttcacatccttaaaggaaatgtattttataaaattaagtctgaacgagaaagcaaagccccatctaacagaagagatcgtgtccttggaagatgatttcttcatctcagctttctcaggtctctcgagatatttattcatagccctcctatggaaacacagggttctcaatgtgagcagctctgttaggtttcatgtcattgcctctcagcagccctgttcagtaagattttcagtgtctgattgttcttataatcaaatgtgcttttccgatttccaaggtaaatttgctttctaataaatgtaacattcgttggtgcccaatgaagtcttttttttttaacttgtcaaattacttagtacagaaaaatagctataattcttttctttcttttttttttctcttttttttttttttgagacggagtctcgctctgtcatcaggctggagtgcagtgacatgatctcggctcactgcaacctctgcctcccgagttcaagctattctcctgcctcagcctcctgagtagctgggactacaggcacgcaccactacgcccagctaatttttttatttttagtagagtgggtttcaccatgttggccaggacggtctcgatctcttgacctcatgatccacccgcctcagcctcccaaagttctgagattataggcgtgaaccaccgtgcctggccaaaatagctataattctacattaataataatattaatcattttgtttcatttggaacttttttcaattttgcattttctcaatttcttaaggtcgattctaagaatttacttggtaaatcacaggttctcaataagtattttgaaaattaacgtcaaaataaaaagaactgaacactccaggtatagagaagggttcatttaaacttattttctctaagatgatcgatcttctacattttttaaatgaaatgagatgctataaaacaacatattctgactttttttttttttcagtgagacagagtctcgctgtgtcacccaggctggagtgcagtggcgcgatctcggctcactgcaagctccacctcccgggttcgcgccattctcctgcctcagcctcctgagtagctgggactacaggcgcccgccaccgtgcccggctaattttttgtatttttagtagagacggggtttcaccgtggtctcgatctcctgaccttgtgatccacccgcctcggcctcccaaagtgctgggattacaggcgtgagccaccccgcctggcccatattctgactttttaatagattacttaattatatttaattcctagaaacctcttcaacatccttgtatgagattcacatctgtaggttctgcctttcttatataaggtaggataaaatctttttattctttctcttccattcttctctttttatatcttttggcaccttgtgctctaatataagaacactttaagcttctcttcttgcctttatgctcctgaatacgttttcttctacctataattccagttcccatctcacctcctcagtacctctcctctgagccaaatctggtgtttccttgatgctcagaaatggcacctcctccacaaaccctccctgctatgcccatgtctaggcagaatatttccttctttcctcagggctgttacctttctggagtactggacaggatagttattaaaacaaatggttttttagtcaaatggttatttgacctcctgaccagctagaatgtgagctttctgaagagcaaggggcagttttattctttttgtgtctgcaacactatgctcaataaatattaatttggaagtgagaaaagtgatgttatgatgagttaaagttttcatggttcactttttcttctttgaaataaggactcaattgttcattgctgcatacctttcttgaagcctgaagtagatgttgagatgctgtctttgaaaatgtctgaagatttttccatgataatgtggagactctctacctaaactgttgtccaggataagtgatctccaagggagggcatgaaatggcacatatcactggtttccctgtgacagctgcaggaggaacaccctggagtaatggtgcagtggagagtctttgccaaagagttactgtcaaaactgaactaagctgttccaagaggctcttaactctccctaatacgtatggcttaaaataaaacgtggtgtatacaaatgaaaaaaggaagtttgtttaaaaaggtccggggctttgaaaagctatgctttatgttttcaatttaggagtgtataaggcctttggttattgctgcaggttgaagaatgtgctttaacaaaagtataccagctcagaaaccatttctgtcctctcatctacccactttcctttccattcaggtgccactcaacccattttggcaaccaactaaagatacaatagcatacaccctgttaggaaaatctgtagaaaatgtagctacagttttttttatctgggttcatgcagttagtaaacactagttaagcacagactaaatgtaaggtacagtgctgggcagtgaggactgaagggcaaatgagataaggagcttgtcacacaccagactgaacaagtagcaaatacaagagtctacagtagaaaagatggcagaattagttctgactgatcagaagcagcttccacttaccatcagtgtcactttgtacacattaacctctatgtgcctcacttttctctttcataagtagagatgataatactacctcataggattgtagtaaagattaaattagtttatatgttgttataaacgtgtttacgtatgttacatgtagtaaagattaaattattttctatgttcaaacagaccctgacatctagcatgtgcacaagagaatataattatatttcgttttacaaaagatattgtggactttttacaaggcaaatggcaaagagcttcctaggcagaggccaataacctgagtaaagagacgaagcatggaagtatgaagtgtgctgaaggagttcagtgttgctaaaaatttctttaatggaaaagagtggagagatgtcctggaaatagacttaggtgccagatcagaaagggcatatgtgtcagatcaagaatttgtgaccctaatgtttacattttcgaaaagtaagccttgtggcaaaaaatggagttttgtgaaagaatgtagccatggagctcagtgactaactgcttattataacagcccaagttggagatgatggggccagaatggggacatgctgtccatgtcgatgacaacatgaactaggatttgaaagcagagattatgccaagggcaaaatatccactgcaggtgtatcctttcccttttctagaaaatagaactgtattttgtagaatctttttgttcttcatcaaactctgtttttagacttttaccttcaaaccacccaagaacattagagcctcataaactataaatgattaattttatgactcactatttaaagcaaatggaaattttaaacttgtttttatcatgagagtccctgtctggcaataattgggcaaagaaggcaagataaaaaacggatttttcttcaggatctgctaagtagaaacaacaacatagaggctgggcgcagtgactcatgcctgtaatcccagcattttgggaggccaaggtgtgtggatcacctgaggtcaggagttcgagaccagcctggccaacatggcaaaacccagtctctactaaaaatacaaaaattagctgggcatggtggggtgtgcctgtagtcccaaccacttgggaggctgaagcaggagaatcacttgaacttgggaggtggtggttgtggtgagctgagatcatgccactgcactccagcctgggcgacagagtgagactatgtctccaaaaaaaaaaaaaaaaaaaataagagaaagcaacatagatgctgaactttaaggaaatgtgatataatatggacttgctcaacataaactattgaaaaatgtgtgtagttataattattattgtaatgatcataaatatcatttactgggcccttactatatgtcaagcatatattatattacttatgtaacgtgtagtttattacctacattatctcattttgtcatctcaataatcctatgaggcaggtataattattgtcttcattttacaataaggcaagtgaagctcagaaagattatgagacttgcttaagctagcagaggaaggaactataggaaaaaaatgtggtcaaggcagaactccaacccagatctgattttttttcatttttaatttttatggagagatagtagatgtacatatttatggggtacatgagatgttttgattcaggcatgcaatgtaacgtaattacagcatgatgaatagggtatccatcccctcaagcatttattccttgtgttacaaacaatccaattacactcttttagttattttaatatgtataattaaattattgactatagtcaccctttattctatcaaatagtaggtcttattcattatttctaattttttgtacccattaaccattcccacctccccccacccttccaccagatctgattttagagtccacacacttacctgtcctgcactgagagcacccaaaaacattagcagcaaatctggttctttctctggcccagctccctgaggacacatattaaaaggataagcttctttgatgtcagccacaatcttcaaagtcttttaatttctctaaacaatgagtagaaggtctctcatgcaggaatttatcagaggctttgtgagcttatttatgttcatccactgtaataaatactagtgtgcaggtgcatggggcaagtagtgcaactgagtgagaaaagaactcagaaacatatgagaggctgagaccttgaattgtgtgtcctgagtcaggtaaatttatctcagttgcagtttccccttccataaaatgagtttatgtccatttccctttataattcaatgattagtcaactctaaattttgccacctgaagtgtatctacagaaatactccattccagattgattcagtcctctacccaaattgtctcccccatcagttgatgtgtatgtaaggactacacactaattttcacatttccacaagcaaaacacaaaggtaaacctgatgcctcccaagtaatgctgtatctgctatcaccaaacataaatgattttctgattttccactcttttggaatatctgcatcactgttggctttcattagcatgacagttcagaggtgattgtactaaattttactttgtacacatcctagtggcaatgtatttgtgctgtgatataattcatttcatgatttagtgagtcatgatggaaaaaagtattaggtacttctttttctcaatcaaccaagaacacatcctactttttccatctgttcccggcaacagatgtgttatttgacaagaacccactgatttgtaccctgcctggcatattagactcataccactgaacaacaaggtacctggcttagtgggcaccttggcatagtcccttttaggacccctcctttggttttcataaacagaatgttactgccaatcataatatgtattttgtaatggaatttaagattcagagatttgagtagaaacaacttagctattcctcctccatcagactcctgctggatacagccctcattttctcacacgtaggactgataaggaagatcaaaatggtctcctactgtgtttaaaatctttacttttcactctttaaattactggctttctgtaacttccttctgtgttttctgacatctacagtttcacaattattattcttcaagatttgtcttccttgaagtctccatttttgaagtctgggaggagcaccaaacttggttttattccatcacatttagtgatagacttcttcttctgttttttttgttgttgttgttttgttttgttttttaaagacagggtctcactctgtccaagctgtagtgcagttgtggtggatcatagttcacagcagcctcaatctctttagcttaagccacccttctacctaagcctcccaagtagctgggactataggcatgagccactgtgttatctatggataaacttttcaatgagaagatccaagtatcttggccaaaccaaagccaaaggcagacctctaatgaattcaaacagttctagggacagcttaagataaacagtgtgatcctactcggccttaagagtgaggacgctatcggttcattcagcccagagctaggaggagtctgcttcctgtctgcaagatgctattgcagggtccaaggcaggatttctcagaattgttgactggagcagggaacttgtggccctttgtaattcctaagcatcttcctccttttctaccttgccctcatcaagaatcctaaaccaaaaagtatttggctaaagtgtgaaggagactgtgattctgctttcttgaaatttttcaagttcttaaagcacacaatatgaagctctataaaaattatttatgatttcaaaagaaaataattttaaaattaagatattatgatagaaagtagccttctagtcttgccttaggcatgacaaagaactcaagttcccacctgagagagatggtgagaattgtacttcacataaatactgtttactttcactctctaggaaactctataatgggtgccatttggcattctaataactgttagtgcagaaaatagtgtttccaattatgtgttctcaacacacattttcattagagtagttggaagcaaggtttcaggtaactggaattgacctcttacttctcacagaattagaagtcaagaagttggcacctttctacagatcaagttttaatttatgacagacttggtcaactacctggctttactgtgcctacactctgagtttctcctctcccagtgagaaaactgatagccgctggcatggcaggcggtcttccacatttatctttctaaaagtgcaccaaactatagagcctcagagttagattaagggatactagaaaatcctttctcaattttctgaggctggagtaaagacatttttttctgtactctacatgtgttctcaaattctcccagatggctcctataacactggtctagacattcacttaacaattttcactcagtaccaattctggacctgacactgtgctagccacagagtacagtaaacaacaggcaagttcatgaaacactgtaatgaaactggagaactcattttggttttttccttaagaagcaaattaaaacgtgaaaaagaataaatgagaaactaactggccaacttgtaagtagagattagtttttctgatgcttccttaacatcctaagtacctagggatgtcctttacatgtcagacaccattgagtacctagaacagtgtctggactctggtagggagccactgaggtaagcccttctccactttccatagttgcttcttctctggagaaggaaacagaggaacagcttctaacagtgagaagagtaacattaaggaaccctctctgctctcttgtagccagattgcaactgtatgtcctctccttgttagactgagccaggactcccttgcaagggccccaggcttactctgtaccctcccagccatccctggcttggaagattttggtcatcaatctacatttcatatgcaataactttctcatttgtccatttccttaatcaaaggcatataaaaatgccaagcacagctgctgatttgtctgaaataaccagtactgactagaaagttctagtctaaagcaagggaacattatgtttgtggttagtatgtgcaacctcataactggtaaatcaagaatttccattaacatttgtcagtagttttatgactttgtgacaacttcagagactactgagaaccacttacgatgcaacttgggagtgtctctactaagaagacttccctgattcccatgctgggccaagtgtatccaaacactctgtatataacaatcttagtgttcttggaagtgtagtcccagatcagcagtagcagcatctagcatctcctgggtacatgatagatatgcaaatcctcaggtctcaccccaaatctgctaaatcagaaactgggatgcagacctacaatctttatttaaatatgccctcacagtgattctgatgcacactcaagtttgagaacccctgcatcctattaacaaatacatcatgttaaaactattatgtgtatgtgttgaattagaagttgtttgagagcagggaccatgtattcacagtataaatacactgtgtatgggtgtgcattacacaaacagaacgaaacaatatgtactattgtgacatgcttttattttcttccagcaatattttgtgaaaattctttattttgcatgcatatattttgtgatatggtatctgatggctgcgtagtatcttactgtgccagttacatcaaaatttctttgatcttctagtataggacaccataaagctctttttaaaactagcttttattttttatgaaaataatgcatgcatgtacttaaaaatctgttttaagtagcagcccactccacccctcgtcatgtcttattcttacttttagcagcaatcacttcttggtcctttagctgatactatttatgcccatggttctaaatgatatacatatacttctgtgccgtttcaattttagacattatctatgaaattcctgtgatgcagttgggaatttatctctctcatgtctctcaacaccttctttttcagtcttcccaatatagctttatcaaatttttggttaaagcaaaagttcagtgtttataactgtataaatattattccttgtacagccaacaatatgctatggttacatttattttgttgaaaatatttttttcagatgatattgttcttttttctaaataagcttcttttttaaacaacagttttaagttcacagcaaaactgaaaggaaagtacagcattatcccatatacccttatccccacatgcatagcctcccccattatcaacatccattactagagtggtatatttgctacaattgatgaacctatgttgatgcatccttatcacccagcatgcaaagtgtatgtgagcatgtactcttggtggtgtacttcttaaggatctggacaaatgtgtggtcacatgtatcaatattatagcatcataaagagtagtttcattgtcctaaaaagtctctgttctgcctattcagccctccctcctactaacctctggcgaccacggatcttgttactatctccttagctttgccttttccagaatgtcatacagttagttggagtctgatatggtttgactgtgtccccacccaaatctcatcttgaattcccacatgttgtgggagggacccagtgggaggtgattgaatcatggaagcaggtctttcccatgctgttctcatgatagtaaataagtctcatgagatctgatggttttaaaaatgggagtttccctgcccaagctttttctttgcctgctgccatccctgtaagccttgatttgctcctccttgccttccaccatgattgtgaggcctccctagccacgtggaactataagtccattaaaccctttttcctgtataaattacccagtcttgggtatgtctttatcagcaatgtgaaaatgaactaatacagtaaattggtaccagtagagtggggcactgctgaaaagatacctaaaaacgtggaagcaactttggaactgggtaacaggaagaggttggaacagtttggagggctcagaagaagacaggaaaatgtcagaaaatttggaacttcctagagacttgttgaatggctttgactaaaatgctgataagtatatggacaattaaatccaggctgaagtggtctcaaatggagatgaggaacttgttgggaactggactgaaacaaaggtaactcttgttacattttagcaaagagactggtggcattttgcccctgtcctagaaatttgtggaactttgaacttgagggagatgatttagggcatctggcagaagaaatttctaagcagcaaagcattcaagaggtgacttgggtgctgttaaaaacattccatttttaaaagggaaacagcacaacagtttggaaaatttgcagcctgacaatgctgaaaattgtcagaaaatcccattttctgaggagaaattgaagccctgcagaaatttgcataagtaacaaggagctgaatgttaatacccaagacaatgggaaaatgtctccagggcttgtcagaggtcttcacagcagccccacccatcacaggcccagtaccctaggaggaggagatggtttcgtgggccaggcccaggacaccgccccctccccgtgtagcctagggacatggtaccctgtgttccagctgctccagcatggctaaaagggatcaatgtacagcttgggcagttgcttcagagagtggaagccgcaagccttggcagcttccatgtggtgttgagcctgcgggtgcacggaactcaagaattgaggtttgggaacctccgcctagatttcagaggatgtatggaaacacctggatgcccaggcaaaagtttgctgcaggggtggagaacctgtgctagtgtagtgtgaaaggacaatgtggggtcagagcccccacagagagtccttactggggcatcacctagtggagctgtgagaagagcaccaccatcctccagaccccagaatggtagatccacctacagcttgcaccatgtgccttgaaaaaccacagacactcaacgccagccagtgcaagcagagaggaggggggctataccccgcaaagtcacagggtggagctacccaagaccatgggaacccacctcttgcatcagcgtgacctggtagatgtgagacatggagtcaaaggagatcattttggagctttaagatttcactgccctgctggggacttccatggggcctttagcaccttggttttggccaatttctccttttgaatggctgtatttacccattgcctgtaccccctctgtatctaggaagtaactaacttgcttttgattttacaggctcataggcagaagggacttgtcttgtctcacatgagacgttggtctatggacttttgagttaatgctgaaatgagttaagactttgagggactgttgggaaggcatgattagttttgaaatgtgaggacatgagatttgggaggggccagaggtgaaatgatgtggtttggctctgtgtccctacccaaatctcaacttgaattaccacatgttgtgggagggacctggtgggaggtaattgaatcatgggtgcaggtctttccctgtgggagcatggtttcccatgctgttctggtgatagtaaataagtctcacaagacccaatgtttttaaaaaggggagttgccctgcagaagctctctttttgcctgccaccattcatgtaagacttgcttctccttgccttgcaccatggttatgaggcctcaccagccatgtggaactctaagttcattaaaagctttttcctatataaattacccagtcttgggtatgtctttttttgttttatggagtctcactctgttgctcaggttggagtgcagtggtgcaatctcagcaccaaaacctccacctcctgggttcaagggattctcctgcctcagcttcccgtgtagcttgtggcaccatgcttggctaatttttgtatttttagtagagacagggtttcactatgttggccaggctggtctcaaactcctgaccttgtgatctgccttcctcagccacccaaaatgctgggattataggcgtgagccaccacacctggcaggtatgtctttatctgcattgtgaaaatggactaatgcaaacacacatagtatgttaagttttttcagttggcttatttcacttagtaatatgcatttatggtttatccatgtctttttatgccttgatttattgctcatttctttttatcactgagcagtattctattttctgaatatgacagtttatttatccatccacatactgaagggcatcttgtttgcttccatgttttggcaattatgaatgcagctgctacaaacattcatgtgcaaaattttgtgtggacatagttttcaactcatttgggtaaatactaaagaatacaattgtggaagcatgggtagctttgtaagaaaccatcaaactgtctttcaacatagctgtataagtttgcatccctaccagcaatgaatgagagttcctcatgctccacatcctcaccagcatttgatgttgtcagtcttctggatttaagcaattttgttaggtatgccatgatatttcattgttactttaatttgcaatcccctaatgccatatgatatagaacatcttttcatatgcttatttgttatctgtgtatcttaattgggttgttaactttttatcattgagttttaatagttctttatatattttgtgtaacggtcttttgtcagattgccttatttattcatttattttaatcaatttatttgttttgatttcaataggttttgggggaacaggtggtatttggtcacatatataagttcttcagtggtgatatctaagattttggtgcacccatcacccaaacagtgtacactgaacacaatgtgtagtcttttatctctcacctccaattattgattgatgggcatttgggcaggttccatatttttgcaattgtgaattgtgatgttataaacatgcatatgcaagtatctttttcgtataatgacttcttttcctctgggtacatatccagcagtgggattgctggatcaaatggtagttctacttttagttctttaagggatcttcatactgttttctagtggttgtactaatttacattcccaccagcagtgtagaagtgttcccttttcaccatatccatgccaacatctactattttttgatttttttattatggccatttttgcaggagtaaggtggcatcacaaaaccacaatgtggttttgatttgtatttctctgatcattagtgattttttaaaatatgtttgatgtccatttgcatatcttcttttgagaattgtctattcttgtccttagcccactttttgatgagattgcttttttcttgctgacttgagttcctcgtagattctggatattattcctttgtcagatgtatagattgtgaagattttctcccactctacaggttgtctgtttactgattgttactttttctgtgccttttagttcaattaagttgcatctatttatctttgttttgttgcatttactttgggttcttggtcatgaagtctgcctaagccaatgtctagaagggttattccaatgttatcttctagaatttttatggtttcaggtcttagatataaatgcttgagccatcttgagtcgatttttgtaaagtaagagatgaggatccagtttcattcttctacatgtggtttgccaattatcccagcaccatttgttgaatagggggtccttttcccacttcatttttgtttgctttgtcaaagatcagttggatgtaagtatttggctttatttctgggttctacattctgtccattggtctatatgcctatctttataccagtaacatgctgttttggtgactatggccttatagtatagtttgaagtcaggtaatgtgatgtcttcagatttgttctttttgcttagtcttgctttggctatgaaaggctccttttgggttccacatgaattttaggattgttttttctagttctgtgaagaacgatggttgtattttttgggaattgcattgaatttgcagattgcttttagcggtatggtcattttcacaatattgattctacccatctgtattagtccattctcatgctgctaagaaagacatacctgagactgggtaatttagaaaggaaagaggtttaatggattcacagtttcacatggctggcaaggcctctcaatcatggtggtaggtgaaggaagagcaaaggcatgtcttacatggcagcagataaaagagtgtgtgcaagggaactgcccttataaaaccatcatttctcatgagacttactcactaacacaagaacagcatgggagaaacctgcccctgtgattcagttacctcccactgggtgtctcccaggacacatggggattatgggcactataattcaagataagttttgggtgggggcacatccaaatcatatcaccatccatcagcatggaatgtgtttccatttgtttgtgtcacctataatttttttcagcaatgttttgtagttttctttgcacagttctttcacctccttggttaggtatattcctaagtttatttatttatttgaagctattgtaaaaagggttgagttcttgatttgattctcagcttagtcactgtttgtgtatagcagacctactgatttgtgtacattaattttgcatcctgaagctttgctgaattcatttaccagttgcaggagctttttggataagtctttagcattttctaggtatacaattatatcatcagcaaacagtgacagtttgacttcctctttgccaatttggatgccctttaattctttctcttatctgattgccctggctatgacttccagtactatgttgaatagaagtggtaagactggacatccttgtcttgttacacttttcaagggaaatgctttcaacttctccttgttaagtattgtgttggctgtgggtttgtcatagatggtgatatggtttggctgtgtccccactcagatctcatcttgaatttccaagtgttgtgggagggacatgatgggaggtaattgaatcatgggggcaggtcttttacatgctggtctcatgatagtgaataagtctcacaagatctaatggctttataaggtggagtttccctgcacaagctctctctttgactgctgccatccacgtaagatgtgacttgctcctccttgccttctgccatgattgtgaggcctccccagtcatgcaaaactgtaagttcattaaattctttttccagtataaattacccagtctcaggtatgtctttatcagcagtgtgaaaacaaacaaatacagatggcttttattgcattaagttatgtcccttctacgctgattttgctgagggttttaattataaaaggatagtgaattttgtgaaatgctttttctgcatctatggagatgatcatgtgatttttgtttttaattctgtttttgtggtgtattacatttactaacttgtggatgttaaactatccctgcatccctggtatggaacccacttgatcatggtggattatctttttgatacactgttggattcagttagctagtgttttgttatggatatttgcacctatgttcatcagagatattggtctgtggttttcttttttttgttatgtcatttcctggttttggtattagggtgatactggcttcatagaatgacttagggaggattctctctttctctatcttatggcatagtgtcagtaggattggtaccaatttttctttgaatgtctgatagaattcagctgtgaatccatctggtcctggactctattttgttgacaattgtttgattaccatttcagtcttgctgcctgttattcgttcattcagagtttctatttcttcctgctttaatctagaaggcttgtatctttccaggaatttatccatctcctctaggttttctagtttatgcgcatagaaatgttcatggtagccttgaattatctttcatatttctctgttgtcagttttgatatcttccattccatttctaattgaacttatttggattttctgtcttcttttcttggttaatcttgctagtggtctatcaattttatttatcttttcaaataaccaggttttgtctcatttatcttttgtattttttttgtttcaatttcatttagttctgtttggatcttggttatttcctttcttctgctgggtttgggtttggtttgttcttgtttctctagttccttgaggtgtgaccttatattgtctgtttgtgctctttcagactttttgatgtaagcatttagggctatgaactttcctcttggcaccgcctttgctgtatcccagaggttttgataggttttggcactattatcattcaattcaatgaatttttaaatttccatcttgatttcattgttgacccaaaaatcatttgggagcaggttatttaattccaatgtatttgcgtggttctgagggttccttttcgagttgatttccagttttattccactgtgatctgagagagtgcttgatataatttcaattttcttaaatttattgaaacttgttttgtggcctgtcatatggtctatcttggagaatgttccatgtgctgataaatagaatgtatattctgtagttcttgggtagaatgttctgtaaatatctgttaagttcatttgttctagggtgtagtttaaatccattgtttctttgttcattttccatcttgatgacctgtctagtgctgtcagtggagtattgaaatcccccactattattgtgttgctgtctatctcatttcttaggtctagaagtaactgttttataaatttaggagctccagtgtcagatgcatatattcttgggattgtgatatttttctgttggacaagtcattttatcattatatgatgcctctctgtgtattttttaactgctgttgctttaatgtttgttttgtctgatgtaagagtagctgttcctgcttgcttttggtgttcatttgtttggaatatctttttccacccctttaccttaagtttagaagagtccttatgtgtcaggtgagtctcttgaagacagcagatacttggttagtgaattcttatccattctgccactctttaccttttatgtggaacatttaggccatttatagtcaatgttagtattgtgatatgaggtactattctattattcctgttatttgttgtctgaaaatttggtgttttttaaattgaggttttgttttataggtcctatgagatttgtactttaaggaggttctattttggtgtgttttgaggatttgtttcaagatttggagctacctctagcagttcttatagtgctagcttggtagtacaaattctctcagcatttctttgtctgaaaaagactatatctttccttcatttatgaagcttagtttcccaggatgcaaaattcttggctgatagttgttttgtttaaggagactgaaaatagggcccaaatcccttctagcttgtaaggattctgttgagaaatctgttgttaatctgataggttttcctttataggttacctggtgcttttgcctcatggcttttaagattctttcctttcatcttgactttagataccctgatgactatgtgcctagacaatgatctttttgcaataaatttctcaggtcttcttttaaactggcctttttaaatgaattgtgctagtcttcagtgagcagtttgaatatggagtctctaattcatttttaagttcttgaaagttttcttgaattatttacttgataattttctcctatgtattttttttttcagttctgtttctgtaactactgttagttttgtattacataggaatttattctctagatttcatttttacaaacattcatctcattgtccttttattccactttctgggagatttacttaaatatatcttccaattatttgactttttaatactcatctgttaatttttttattttcaacactacttttgcattttcagattgtttctttttcataacaacctgttcttattttatggctacaatatcttttattatttacatctatcattattttctgttttctgcatatattatgcatgcattttttttctatttccttgttttctgtttcttttgacatttgactttcattttggaagtttccctcaatttatgatcatcttctgctgctgattcatatttaagaataaagcaaaaaataaagacagattttgaaatgtgtttgagtggaaggttttatgttcactgtagcttggtcttgctgagccagcccttttggaggatacctgatttagtgtatataggtttttctctagagagacattgaattttttcagaaaacacctcatactcttgcttgggaacataacccttgcttccaggaggctgaggatctcaccattctgtgtatggatttggggctttcagctacaagttgaaaaccaattctccattgtgtccgttgctctctttatttcaagtactgagggaaaaaattttttgccttctctctgggagaggactacagttgcatgcctattctctaggtattgactttcaaccagtactctgttcctcttttaccccagcattttgttgtgctttttaagatatcctggactcttagtctgacttactacctctataaatgaaaattgcttgaattttcagagcctctttacccttatctgtagaatgtccaccttaggaattgaaagaattatttatgtaaaaatactttatggctggatgtggtggttcacacctataatccaagcactttgggaggctgaggcaggcagatcacttgaggtcaggagtttgagaccagcctggccaacatggcaaagcccgactctaccaaaaatacagaagttattctgcacctgtagtcccagctactccagaggctgaggcaggagaattgcttgaacccacgaggttgtggttgcagtgagtcaagatcatgacactgcactccagactgggcgacagagtgaaactctgtcccaaaaagaaaaacaaaaacaaaaacaaaaactttgtgaagtaactgtaaaccacagtacaattcagctatatgactgtgacttctttctatgccattagatgagaaactcatatatgacagctacactgctacagatttatatggtctcttttttcgtttttcttttctttctttcttatttatttatttttttgagtcggagtctcattctgttgcccaagttggagtgcagtggtgcaatctcggctcattgtggcctccgcctcctgggttcaagcaattctgcctcagtgtcctgagtagctaggataagaagcatgtttcaccacatctggctaatagatatttcttttaagttttatataatcttaaaagttcaggcaaatcaataaatgtaatccagcatatatacagaaccaaagaaaaaaaccacatgattatctcaatagatgcagaaaaggcctttgacaaaatttaacaacccttcatgctaaaaactctcaataaattaggtattgatgagacgtatctcaaaataataagagctatctgtgacaaacccacagccaatatcatactgaatgggcaaaaactggaagcattccctttgaaaactggcacaagacagggatgccctctctcaccactcctattcaacatagtgttggatgttctggccagggcaattaggcaggagaaggaaataaagagtattcaattaggaaaagaggaagtcaaattgtccctgtttgcagacaacatgactgtatatctagaaaaccccattgtctcagcccaaaatctccttaagctgataagcaacttcagcaaagtctcaggatacaaaatcaatgtacaaaaatcacaagcattcttatacaccaataacagacaaacagagagccaaatcatgagtgaactcccattcacaattgcttcaaagagaataaaatacctagaaatccaacttacaagggatgtgaaggacctcttcaaggagaactacaaaccactgctcaaggaaataaaagaggatacaaacaaatggaagaacattccatgctcatggataggaagaatcaatatcgtgaaaatggccatactgcccaaggtaatttacagattcaatgccatccccatcaagctaccaatgactttcttcacggaactggaaaaaactactttaaaattcatatggaaccaaaaaggagcccgcatcgccaagtcaatcctaagccaaaagaacaaagctggaggcatcacactacctgacttcaaactatactacaaggctatactatactacaagtaaccaactatactacaagtaaccaaaacagcatggtactggtaccaaaacagagatatagatcaatggaacacaacagagccctcagaaataatgccgcatatctacaactatctgatctttgacaaacctgagaaaaacaagcaatggggaaaggattccctatttaataaatggtgcttggaaaactggctagccatatgtagaaagctgaaactggatcccttccttacaccttatacaaaaattaattcaagctggattaaagatttaaacgttagacctaaaaccataaaaaccctagaagaaaacctaggcattaccattcaggacataggcatgggcaaggacttcatgtctaaaacaccaaaagcaatggcaacaaaagccaaaattgacaaatgggatctaattaaactaaagagcttctgcacagcaaaaaaaactaccatcagagtgaacaggcaacctacaaaatgggagaaaattttcgcaacctactcatctgacaaagggctaatatccagaatctacaatgaactccaacaaatttacaagaaaaaaacaaacaaccccatcaaaaagtgggcgaaggacatgaacagacacttctcaaaagaagatatttatgcagccaaaaaacacatgaaaaaatgctcaccatcactggccatcagagaaatgcaaatcaaaaccacaatgagataccatctcacaccagttagaatggcaatcattaaaaagtcaggaaacaacaggtgctggagaggatgtggagaaataggaacacttttacactgttggtgggactgtaaactagttcaaccatcgtggaagtcagtgtggcgattcctcagggatctagaactagaaataccatttgacccagccatcccattactgggtatatacccaaaggactataaatcatgctgctgtaaagacacatgcacacatatgtttattgcggcattattcacaatagcaaagacttggaaccaacccaaatgtccaacaatgatagactggattaagaaaatgtggcacatatacaccatggaatactatgcagccataaaaaatgatgaattcatgtcctttgtagggacatggatgaaattggaaatcatcattctcagtaaactattgcaagaacaaaaaaccaaacaccacatattctcactcataggtgggaattgaacaatgagaacacatggacacaggaaggggaacatcacactctggggactgttgtggggtggggggagggggagggatagcattgggagatatacctaatgccagatgatgagttagtgagtgcagcgcaccaacacggcacatgtgtacatatgtaactaacctgcacattgtgcacatgtaccctaaaacttaaagtataacaataataaatttaaaaaaaaaagaaaaaaggaaaaataatcttgtaaaaaaaaaagttcacatgaatcttgcatcttgctccataatttatctgttttaatgtaaaaataatgttcttcaatcttttatcatggagccaaactgacaattcaggaagatatgtgtattccttttgggatttatgtgcctcccagcatattgggagatatccttagcagtttatgtacccctgtttaagttttatagaaataatctctaagccattagttctgataaatttggttccttccaatcctttgtttctaaactttgattcaggatgatctgacaaattaaatagcacccttaaacaataaggcatcatggcccagtatacagagaaatatggagatagaatagaattggcatggtgtctcacgcctgtaatcccagcactttgggaggccaaggcaggcggatcatgaggtcaggagatcaagaccatcctggctaacacagtgaaaccccatctctactaaaaatacaaaaaattagccacgcgtggtggcgggcacctgtagtcccagctactcgggaggctgaggtaggagaatggcatgaatccaggaggcagagcttgcagtgagtggagattgctccactgcactccagcctgggcgacagagcaagactccatctcaaaaaaaaaaaaaaagaatagaattgactatgggctgttgagggagtagcttattacaaatgtgtaaacctacttgtgccttgttgttgtacagaacagtgaaaattgccaggggagtggagaagaaaattagcagtgtctgcctattctggatatttcacatcaatggaatcatacaataagtggactttgagtctagattctttcacttagcatgcatgatttttcaaagtttgtgttttagcaaatatcagtacttcattcatttttatgactgaataatattccattgtatggatataactcattttgtttattcaatcatcagttgatagatgtttgatgatttctcttttggctactgtgagtagcgttgttatgcatattcttgtacaggtgtttacttgaatacctgttttcagttcttttgggaatacttaggagtagaattgatggatacagtaagtctatgtttaatttattgaagatctgtcaaattgctttctacagtgattgaatcattttatattcctactagcaacgttgaaggttcaaatttcttcacattcttgccaacccttgttatttttcatttttttaaatagccatactaatcagtgagaggtagaatctcattgtggtttttgttttcattttcctaatgactaatgacattgagcattttttcaagcgcttgttgaccatttatatatctttagagatatgtcaagtcttttgcccatttttaaattgggtcgtttgtctttgtgccgtggtgtttcaagcataaatctatagacaaaataaaagctacttgttggctgttttattggaaatcacacaacttgggaaagtctcaaggataaattttgctaaattctttgtccactattcactaagagggtcccttaccctttcttttcctttgatcattggttatctggtttcacctgtcaagaaataagctgccctttgattgtggataataggtgagacaccgcagaatcaagttacactgttgcatctgtaaagtttcatcactgtgtgtttccaggagtcaggatttgccatcaaagtcaattgccgaatgactctgactttattattctttatttgcattaacaattgctctaagcagtaacacgattataacccaaaacagcagcctgttatctatcatttatttgatttaatacatagaaatggatgtctttcaaagagcatttatttttttcttcacattctcttccaaaatcattctcagtggaaacatttagccttataacatggaggaattcctttgtaaatccagtgactatgtgggagactaagaatttctgattttattaagtattttggataaatgggtaaagagaggaatggtggcagattttacaatggttggtttaggcttctgtaggccttgagtaaggtgagtaggagtaatgcctgtggtcatttcatttgaatggcctatttattgaagtaaattcatagttcaaaaagatccaacttagaaaagcctgaggcagaaatggaatcctgggagtgcagattggtcattgttttatttaatctgattccactttattctcctcacggtgaaattgttctttatgatactctgtatctactggtagttcacatccttcacagaatcctctaactatgcaaaacacatagtgaacagttatcatttgaatcttagtacaactttaataagctgtgttttatatttaagtagtttctcccctggtggttgcccgtggcagactttggagtttgatagctcttcactccctattttatacatctctaagtaattataccctgtgcccttaagcctcaaaagcataaaattatttaaaaacatacaattaaacacttcagatgacagtgttaaaacttcagaagaagacactcactttggaagaatggtgcttcgtgctggagcctttatatcagctccttcttctccagagactttgggctgaagtttctgtctcagcatgggcatctgccatgcttgttacaggctcaggatgacccagcctcaaaattctattaacttgggataccattttgcaagggaattcttgtcatcagctttgagggaggggaagcataatgatatacctgatgttgacagtaagtgttgtagtggcagtgaccacgtgttatactcctgatggtatgctaggctccctaggtacattgttttacttaatcctattgaaaccccacaaggtgattgttattaccctctcattttacagatggaaagactggggcttaagtagttgtttggttagtgagacagtaaaaagcagaataaggatccagacttaggtaaactgaccacagttctgaaaaagcaagctgggcagggtcttgatggtgcatagcatgtcttcagcatggtctcctctgggcagtgtgtctgactttcctagtcagcctgaccacatggcctcctgtttccttggcaccctgtacgtgcttcttctgcagctgttgtcatcgatatggcaactccctccaaacctgtccccatccccccagcctgtaaacttcttgagagcaatgatgctgtgttgtttacctctgtatcttcaagactcaacacagaacaggagttcaaagtttgtggaatgaatagtggaattaatggtaaaaaaaaaaaatgtgtacatacgtgaattaataggttgtttcctgctctctcccccaactcttaatataaaatgggcccagccattttcataagtccctgggtaaatcattccattatttttccctttactttgttcagtccccataattccttttttagactgccttgtgcattcttattttctacagttggcacttatctgtgatccaagccacatacagccttttaaaagtgtgagatcttacccattagtaggtcttgaaattaattttgagggtggcagccagcattttttttttaaatgaagagactagaaaagaatacaacttctcagcatgcatggcacatagaaagacacagtatttgtttcagatggatagataaatagaggacatatatgtatcactagcacttgtttgaccacaagtcacacactaggacatcatttaagacagtgaaagacatttaggcacatagacacagtatttgtttaagatggatagatagagaacatgtaagtatcactagcactgattaaatatcatacgtgcagccatgttttaagaaggccaaatgctgcagggatgctcattaggggagtgtattgcaacaaccactatccacattttaaaaaattgtacattgtgaccaattacatatctgctgtgtaccagattgtactctgaagtatattccttattgttggaaaaacactgtcctaaatgacgtcccagtgtgtgacttgtggtcaaacaccccttgctctgctaaagtagttcctaaagtcttatattttgtaaaagctattataaaactgtcaccaaagtttagaaaatttaatcccagtgcaattattttaatgatgttaaagtataaatgctgcagagaatttaataggaaaaacacatagaaagttctaaaaattttaatagtgggagcttaactttgaggtttgcagaattattttattttgtactcgtctttaaatttgcttctccaaatgttcacctaaaagtcccgctgctttaggtaaattgcgggggctacatttatatcagtcagtggcattcatgtaggatttcaacttcaacttgctgtgaaggagccagactttgctgtggaatgcattcatgtgcagagctgccttgcacagctcattggagataagacagttttgacttcacatgccaaacttttgtcactttgtctattttcgtatttctctatgactctgcagagccaagcttttgatcggttgagcagcaaattgaaaatgctcttcttaaaaaatctaatactaaagtgaataccaagcaatactgcatttcctgaaatgaatatttgttgagtgcttactctgagctagccaattgttgtaccctggggttataaaaaatgaatgagattcactttctgctctgaagagtcttctggtcgaggagctttcctaccgcagggtttggattcatcttgcttgggtctacgggtagactgaagatccttcgtttgccctcccaactcattctgggcctttccccacctttgacctgtgaggctggtcaatatgggctgcaatcgagggctcccttgctgtctggcatctggttaggtttaaccagggggagcactagcaggaactagagggaaggagaatggagaggttagcatatgtgttctcccggctccctccttgcaaggtcacccaggttggctctgtctctctactaaaagtcacagcttcattcaggtgtcctctccacactgttctttctgtttccatgttctagtgactgctccctcccctagcttgccctcctttcccctatagggtactgtgccatcccttgtggttttgctataccctcaccacaaactcctaaatcacccttttgacactgacttagtacctcactgaacacgactttactctgaactttttcctttaggtcctttcagtgctcttgacttatgccttagctaattttctgccatgatttcaaaagacttacgtatttgtacgtttccaggaagccatcttattaatcaatatggaaagttatttaaaaccacaacctctggttcttacaaatatgtgttagctctatgaaattgatacttggaaagctcaataactatttataactgtgggtgatgttgatcatgacccatcaataggtcagagccttcattgttaattacctagttcactaggctttgttacaggctggatggaggtaggtatcccgggaggaatagtcttacagaatagtaggagaacttaccactttgctgacaagttgaccaccagtccccactttgtgagtcctattttaagtgttgccatctgttctcagaaaagaattaaaaaggatgagataatcatttaagcccctggcaacagcaatagctgagtaagtggtcatttattcattgcctctgtatatcaggcattctacttcacaagcatcctactagaatctttaaattatcattatatttaacaattacaattaccctacgaggtcattcttaattccactttatagacagagaagctgggagtaaaagaatgtaggtgactttcccagggaagcacagctggttatttccagagctatgatttgaacccagctccatcaaactcagaagtattcctcccactatttcatctccccaaatctctttctttttgccttcaatgttgccaaaagtcatgtttggcatcaggtttaagattattaaaacttcaaactttcttttttcaaaatcaggcgttctataaattaaaaacaaaatctgattgggattcatctccttctcttccaatagaaacagagtagagggcatggaatttgagggaaaaggaggaagaataaatgaacagcatatgagcaaaggacctggggaacccccaagtgactaacaatcaaaaatagaattttctgcatgtcagatattgagtcattcgctgcatggcccaattaacctttcttctgattccagattttgaacttgtgtccttggagaacaaaatgcttacccattgccttggctgagtcacttctgtgcagttttagatgaaccctgcttgcacattattccattggaaacaagcattttcacagtaggttaaggactgggactaaaagaaaagagaaagctaagatgtccatctgaaaactgtcagtgtcgtctcaatggaaagttatgatgttttacttctctgaaaaagctaaagaaagcaatctggccagttataaatttaatttatgaaaataataccacaggcctaaatcatccaacactatagctattgattcttctttctagttccttggggaacagttgctgtatttgagaaggtagaactacaattgtcttactttgtcatttaaatgtcatattagccaaacactgagcacagctgaagggttgcaaactgactaggaaagaatgggatagtatttttcattttttttttaaatgtaattggtagacagattttcctgttggtgagggctgattttttttcctcattatttctctctccttttattttctccacaatgttgcattttcttggttttctgtgaggcattaggaaaggataaatcatgacgttctgggtctatggtcttttttaatctctcagattattttctttaacagaattgttggaaagttggctgttacctgacagaaaataaaacaaccaatttttcatcgcaagttaaataaacattgaaaaatcagcattctacaaggaccattagcttatgtatcactgtaaaatgttttatgactcttggtataaaggatgctcatataaaaataaattgtgtcataacaaacatttctcccagtcatggtttgtaatagccttaatctcaaataaatctaggttgaacattgtagtctccagaaaaactgaccttcagtttcaaatagttgggttaaatcattgtgatgatgacatagtctcagatataaggagatatgaacttgtatcagctccccagataatcttttatttagaagaggagagatgtctcaatgaactgaaattgctcttgagtgaaccattttatttatatatcttcttattctgactaccagttcacacacagtgccacagagaatcctgcacatagctccctagggttcctgagagagcaatccatggaaatacatagattaaaaaccatgagcaattgccattttacatctgtcaaattagaaagcatttttaaagtgcaatactgctgctacaatgttggtgaagtgactggactcatatactactggtagcaatataattgctttggaaagtattttggcaatacatcaagtgttaatatactttgatactacaattacacttctgagaattttgtgtaaggagtaatttagaagaattcagaaggctaagatgttcactgcagaattttttatactagtgaacagttagaaacaactacgtgctcaacaatggagactcttagtcaattttaaaagtctgtaatgggttatttgcatgaagtctaattggcaacgtttaaaattttgtgatatagagctcagtaaaaagtactaattataagcatataaaattattgcatatagataagaagcagacttcgctaaaattgttcagatttagctgttaaatgatattttagctttataatttttgtattaaacaataagatctaaaaactacttgactgtgaagattaatattaatgaaaagatgtttttattcgcactttccttaagatgttttagttgttcaagtatgaatctttgagacctgaaagtgtcaaggattcggagaattggcatttatatgatctaatttacaaaaaaagaaaagaaaccaaataaatgaacaaaagagagagacattcttccagaataatgaaacctcccattcttgttcttttggggatttttaatgttggcacttggagtaagaagatctcatcagataatttagagagaagtcattcctttaacatgatgaagcagtgtagcttgtggccatgaaccgtgaaatgtcctgatatgagtggcgtaagtaggctttttggaaggggctctatcccaaagagccataggacagaagaaaatgtgaatataggtgatccatccctgctatgcttgaatcagatctataaacattgcatagggaaaaaagaaaacttttggaaataacctaaatgcccaacaactggggattagttaaataaagcatggtatagtcagatgatgaattattaagtaggcattgagagtaaagtagaaaaatattaatattaatattaatctgattaagtgtctgcagtaaagttatgtgaaaaagggagataaaaattatgtatacaatattaaaaagttgtaaacttatcaatagtggttatctggatgttggaataatagacaattaattctctattcctgtccatattcttcaattttttttctcctatactgtgcattactaaaataattaggaaaaattttttgcaattattttttcttaaactgtatgggtacccaaatacataatgaatgagctattgcctgaaataatttaaaaagtggcagcatataaattgcaataaaatgaaatacaattttcactgtataaatggaatgaaagtctaaagcagtactcaggtaaggacatttcgttttaatgtaacgccagtgaggagcttgcatttaagtgccaaatattggtatttatgtatatgaaagctcttctttactctcttatattttctttttttctaaaattttttttttgctaaaattagggtgtcatatataccagaatcaatcaattcttccttctctccttcttttctttctttcttccatccccctacctttcaattctgcaaagataggcaagtgagtgagggtgggtctagcttagtgtttgcccatatgtaaaatgttttgagttcataaaatcctgaaaaaattaaagcagcagacagaaaacagaaaagacccccacttagatactgattagcaaatagacacaaacatttcctctaaatacttcagtgcctgtgatttaagtagctacttgggacacattgaagagtctgttgttagctttctgcattcacatgataagaaacaaagaattctttaggcttgacctttgcaaatagaaaatcctgaaaacgagaatgctgtaatttttctttgtgaagctcaaacatatattgaaagagattggcctcgaatctgtcaccttctcatcactaaatatggcagccctgaagttaattaaataatgcaaatgctcaaggcggccttcactcactcctttcgatgcactgataaatggaggattttagttaggggtttgttcttgttcttactcatttttttaccaaaagattttgtctttgcttgtaatacttgaggatctacactcccattatctcaattgaggctaagggactaagggattccctgtccagtgtgtgatgggccagtgtaatcattataagtgatttcaaatcaatataatttggcaatagcaaaaactatgagaatttctcctcaactttttattggttttaggtaaatacttatgaagtagaggaaagaaggtaggacatgtgaatggaaggaaggagggaaagagaaaaatactctgaagtcatgcaggaaaaaataatttctttccttggccactgaacctgttgatgtggactcatttgttttttctcccttggtggtttaaaagagaaagcctcaccaaagggtaatcaattgattattataatattattagctggattaaaataatgttatttgtgcagaaaacaattcttgcatatgtttattttaaattcctctgattatgtgttgtaatggcttagcctaggagttagccaaaaatgatgtttttctaacacaagactgttgttgaaagacttctttttccctaattatttattgtgatcctaacacaacacacaccctcctgtttcctccttcatgccatcatcatttacatttttgttacctccttgtggatttgagggacgatatctaatagtacagaacatagcattgctccaggacctagcacaatgtcttgcctagtgtaggtgtttagtaaatattgaatgaattaaattcagaaccctgagggagaaaagtcacaaatttatcaagtaattcacaaagagacatatccctgacagctaatccagttaaaagtattaaggtaagctgaaaccagaatatgtttcaaatcatttctcttcttataagagttttgttactggctggaacagttgtttcttggtatgctgatcgaatgtgacttgagccagaaagattcacaatgaataacaccaggaggcttatgaatgatgtataaagccaaccagtctaatgacaggtaaggcagaggtgagcagttactttatttcagagcagccaaagtcttggcaatgtaatgcaaccacgggaatagtgagtggttgtgaccagtttgtagtaaacttctagaatgaaacaagctttaaatgttctgatggatatttgatcttttgtattaatggagccattgcttcagatgagcacaaatgaaaatggcccctcttgctcctctagtatttgcccaggggttacaaggatcagctaagtgctatggagggtattaatcactttttacttgcagtgaaactatatttgttttttggtaactagcaattctaatacagtaaaacttcaactactaaataaatatcattagtattatgactttaattgaagaccaaggtgtcaccatcttgaagaaaatggtgaaagtttactttctgttccctattgatacaccagggccaacactgatgacctgttaacaataatgatataatttttttttaatttttcctgaattttctttctaaaatctaggttcggcaacagaataatcaaaggatttattgctttgccattctgtgcctagcactgtgaatctctgtaactgacttgatagaaacatagatcataatatttttgggtggaaatgaatcacagcttatggttgcaaaagattccacatgaagctaatggattgtagacatctgggaatgggaaatgatatggtagactggctagctgaagactgggatctactcccactgcatgtgtttctgtatataaaaccaattgctcatgcttctgtttattcattaaatgaaactcttattttatcaggtgggttccttttcagtggcaagttaaaataaattagaagaactagaaagtgatgtcacaaacatgaaatacattttctcctgtgttgtctccctgttgaaaaaaccttttcaaacagatttttccctcatggttccccaaatccaataggggggaaaaatccagggtttcttttcccctggagtttggataaaaactcaaggcttgatctctttagtccaaatgaggtcacctgtccattccaagaggccatcactgaggccaagagaatacctgggtcacagttctctactggaagtgggattagctccacataaactgggttgagcacagggcgggaattcttatgctgaggtgattttaccagaagtagaaattggatgttgtaggcacatgacagatattcactgtgcttactggtagccaggtcctttacagattgttgatacaaagacaaacatgacttgatctctttccctctctgaatctcaccacctgatctttgttaataataccctgtggtcaatttttcttacgtcatatttctaatattgtcctacccttcttcaaaaatgtttctggttctttatcatctattgattaaaatattaactccttggttaactttcttcaatctacctctcaatcctggcaaaagtgactgattacatatccttggattttcctgcctctgtgagtgtcctggaatgtcttcctccatgctaatcactgaccatctgaataccgttaaggtgtagttcagatactgtcttcataaaacacccactgatttccttcatctactgtctatagcacttaacatgaacctatcttaaagcacttactgtttgtttaacaagtagtgccaaatgcttactatgttcttattgtttttctgagtgcttaaaaatatgtttttctactttgtatcagtgttcttggtgctcttgtcttttattcccagtaagcgataagctcagtgaagccgggattcttaaaggcaatgagttacctacccatagtgggcaaacaacatatttatactggataaatacatgttaatccaatttgcacatttattgagcactagcacttcaaacctaagagagtagggccctattttctttcaaatctctctctgcacatagtatggtgacatatatgtgttaggcattcaataaacatttgctaggcctctaaatgtgatggaaatttcaaatatccagatatctaagaatgagccatttccttttgttttacattcttcagtctttaggcatcatttttgaaacctcttgtcattttgctcttcctaacagtttttacaagaatgtctaagttctactttctaagttgagcaggatttgggtccccttttttttttttaacaacagggacattttcagcaattgcaaatgcctatgctattgagccattgctaaaatactgggttttataaagtgcttctaagggccaaagagctttgctggcccatggtctgtgcaggtgttcatgagttaaagcattcaatggccctagcaaacatgacatttaaggaggtaagcattgatttgtagagtcactttcaagtacaatagaacatcttgccttcatttgtgagtttcttgtttgaaatggccgacattttaggtgtttccatgtagaaattttgtctaaaatatgtaaagcataaatgggtaaaagaaaagattcatttacttgatctcatccatgctggacaaggacaaggcttccatgttgtctttctattctgaacaagagattggaagcctttctctctcttttttcttttctgttcttttcttttcagttttcctcttttgtcgtttctcttcatgaataacttttcaaccaagttagatgaatgccaatagctgtcaattgccactgacaactagaatggccttggtgatctgtgtgagaacaattttagggaagtggtgaaggcagaagccagatgacagtggatgaacagttgactcagtagtctggtgagtgagatgtgagctccggaaagggaccacccaagctaaaacccagactctgctactcactagctgctgacaataggcatgttaccaaagcgctcactctccctgcctcaatcttttcctctataaaatgggaataaaaatagaactatctcaaggttgttatgagtagtaaatgagttcacgtggataagatgcttagaacaatgccagtttcattataagtactcggtaaaaattagctgttgtttttggtgcacgtgcgaagacagcaagttgagactacttttgaagcttaattatgaaaattggagagaaaaacgaggccagaggtagatacaggccaggaattaggtgaaaggtgattattttatattctgggggaaaagaagtggctctcggagagtgacagattacaaatgggggaagaaggattaattgatggagtaatagtgctgaaaggcgagtgaggatggaattcagagaagaggtgaatagatggatggataaatcttggatagaaggggcttcttgttctctaaggctgaggctaaagtggaggtaataaggaggaaaggctaagaatgcatgtctttgtgggtggggagtagagagttgaaaggattgaaccctaacagcttactgtctctgtgaaatagaaacaagctcatctgatgggagacaagaggtttcagagtgaggaatagagtagaactcataaatgaaggagaagtcacacagcagtaactcctagagacccgatgacactagccagaatgtatagtctaaccaaaggattgagaagtcaggtatgataagaaattgtgctcacacagtgagacactggcatttgcttccacaggtgggacatttctaggtggtgacaaatctgagatgaaccatttgaaaatttttgtggtctgcagtgtacagcttgaacttaaaaaatatttttaccacaaataaatgattgattatattcatacctttcttgagttattaaattatcttctgtttcctatacatttgcagtgctattgggatggtagactttcagagttgaattatatcctgcctctattccacctaatgcatccttgagaatagttatagatgggaaagtcacattttattgtgcttatcatgttattctttagtagacattccattaatgtagaaacatacatggtgtgatacggattttatcttgtgatgatcagatgaaaagccctcctttcctgcatactcttttgcaatgttatttcatcactcttcccatcaagaggtggagtctacatttcctcctattgaatctgagccaggcttggaattagtttaaccaggataaggcaaaagtagcacagtgtgacttctgtgcctaaaccttaagatacattgcacttttcatttttgccatgttagaatcctgagctaacaagaaaaaaaaaagctttaatttccctggcctgccagagagaaaggccaggtagacagagacccaggggatgaaaaaccatagaaagagatagggtgagacagtgagacagcatcaacgagttcaatcaccccaacagagacattggacatgttagtaggaccagcttgcctcagtcaacacatgtggcacagagacaaaccattgccatagagcctccccacaatgcagaattgtgagcaaaaacatggggactgtcactttaagcagaatagttttgagagctttattatgctgcaatagggcatgaaaagaaagagcctcaaagcagagagacaaattacaagaccactggcataatccagatgtcaggcaatgagctggaaagtatagagagaaaggtagaggaaaatgtgggagagcagtaggtggcaaggttcagcgggacctcatgattggatctgggacaaaggagaaagagaaataaagattactatgacactctgtttctaggaaaataagattgtgaacagcaatatggtctagataaagaactggattttgggggaagataagtccaattggcagttgttatttcttgatgtgataccacaacttctatgtaaaacactcctaagcagctggagatacagaccagaagcaaaggatggagtcaggtgattagaatagctattaactgtttttgtttcaaacaaaaagatgcagtcagctctacttccctgttgttccagcctaaagggtgttttctaatttccttctaactcctatattgagtaggaaaggtagagatgtcaagagaaggcggaagagagaaagagaggagagggagaggactcttgtgaagagaaaaagccaactcgcatcctgtgggattgcaccttattttagttgcacctcttggaagcttcactgcttatgtaaaaataagaaaagcaacatacacgctcaactaaaattatcgtcattcaagagtcctccctttaaatagcaccaaatgaaaataagaaaccctaacctcagctttttaaatcacaatggaaggataagagatgctttccatttatgggatcttagaaccttcaaaatggtgctacttttgttccgtgtgtgcatagggaggaagctgggaatgctgaggtggcgaggtttcacctggcagtcaggattgctacttcccactcaccaagttgtgcaatatttgcaagaagagcaaaaaataaaagatagtgtctctttaaaagggagacagtgtagtttaaagaggctacagtgtagtgtagcggcttacgctctgtggtcagcaagaactgagtttaggtccttgtcccatcacttactaactgtgagaccctggatacaatatcaactcctaaaaacctcagtcacttcagctgtaaaatagggagaatgctgtatactggggttgttttgaagagtaaagcagaatatgtatgaaaagcacttagtctggtaagggcacaagttactaagtggtaactatagtcattggaattagtaatttgggactttcacatatttggcttatcattgagactattttccaggaatgtttacaataagaaacttgggccaactgcattttagtcaaggattaaaatgtaacaaatgtgtaatattatattatgtaacagcagatgattttaaaatttacaagtgtcattaagatttctctcctagggtacaaatgttgttgtttcacagaatttttaaaaattattttatttattttttattctacttttatctctgggatacatgtgcagaacttgcagacctgccacataggcatacacgtggcatggtggtttgctgcacccatcaacccatcatctacattaggtatttctcctaatgctgtccctcccttagcccccagcccccgacaggccccgctgtgtgatgttcccctcactgtgtccttctgttctcattgttcaactcccacttataggtgagaacatgcggtgtttggttttctgttcttgtgttagtttgctgagaatgacgatttccagcttcatccatgtccctgcaaaggaaatgaactcatccttttttatggctgcatagtatttcatggtgtatatgtgccacattttccttatccagtctatcattgatgggcatttgggtcggaatttttataaaacttcaagcaaaccgaaactgacatactggctacttattttttttcttcataattctggatgtcagaaaatgaacaatgttctaatgcagaaggcaaactttctatgaaggaccagacagtaaatattttagctttgcaggccacatacgatctctatcacatacttctttgttatttcttacaacccttttaaatgtgtaaaaactattcctagctcatacaaaaacaggctattggtgggatttgcctcatagactgtagtttgctgacccctgctctagtataaatttgtcttgtttattactagagtgcttatgccagtaagtattttttaaaagagagagaaaatgcattaagtaaataacatttaagtgattctttttctgattcagacattttctgggatgaaatgagaccattgatcattttatttgatggaatagaactgtttttcattgcagtgcaatgaggttaggtatgattttgaggactggggaccattcagcacattagttctgaaccatatccttgtgctttgcagaatttttttctcttcctcagaggagcagtttgaatacagggctttatggcatcaggcataagctgccattaaaaccttcaactgaaaattgtgctgccctttatgaaaatgagcagctggtcagccggaccatcgcccaccctcagctctactcatgttgtgtacaagtagcttgaatagcccttcatgagcaggtcttctacagacattttcctatcagtgttgggagggaaagccagaccagcagctagtgtttctttcagcctgtgttgtgccttggcatctgactctctgtggacccaggagtgaaatatcttcctggaagtggtgatccaggttagtcttgtctctctgactcatgtcccaagttgcttccatagagatacctgtggcatcttttccccctttactctgttttcctgaatttccctctatttttcactgactacaaagataaagaaaaagaagaaacaattttaaaacatataaagtactttgaaatatttatccttggataactggagactagatcacattcttatcttttcatccagcatttttttttttggtgaataccatattatgtgtttaaaaagacatatggagacctgactcacactctgaatcttccaattttccattgaccacattcttaatgccctgagaacacaaggtcaggcaaaggagcctctcagctgaggtcctggccccaggccctaaacaggtcttctgtgagccaggccacagagttccttttggttggggtcagtcttagcagaatgtagatcctggagcaaatttggtcaagcagcttcctttgctcccatcaccctaagcctgcactggggcctgacttctggcatctcaccaatccagtcatgagggatggctggctcagaaagagcaccttgtcaaggaagaagcagctcaagatcacgaaagcccaagcacatttgtccctgtgcccagaacagagctagactggtctgcctctccctgcattcttggggctcttcactctgtgtattctcagggcaagggttgtaccaagggagagcacactgtccagcctcctctcaccaattcattcagtcatttacccactcaatacagatttagtgagtatctgtcatatgccagacacagttctaagtactgaagacacagaagtctttgctcattttactccataacttgctctgaagaggtgcctccaaggatcttactctttcatgggctctgttctcgatcacttttgctcagtattgtgaaacctatgggcctgtgatcagaaaaaaaatgtctttaaaccagtctaatccatgtcaaggtcctctttggaaggggagtagcaaggactggtgagaagggagctgtgagtgcttcttgaatgtaggacctgctccttactggggagaatagctcactcatttctaccttcctccaggtctcatgaacatgcacagtcctgtgtgttgcatctcctaatctcatctgattctctgctgtttgcctggtcttggactaatttccctttagcccacatgatgatctttaagttaagtctcagcctatttagactcaggctgcctcactcaccttgcagttgccatctttattatattatggcagtcaaaggttattttgtttggacagagaagttactctactgtatggtggactacctgtcctgaacgttcgcaaacatatccttttgttttctggagttcctcctggtttgttttctgatggatttctgttgactcccagattgaaccaatgtttatcctgtgtttggtgtatcaggcttttctgttctggttgatttcctgtagctaatttctagggagacttcaattcctcactgaagtcaagttccttgtcatagaggcccagtatttctaactcccattcagacagaaaatttgtttttattacccacaagagaaaatgatctggctttcctgctctaaagatacccctagtactactattttttccagtcttgtgttttcagatatttttctttaattgaccttctctatggtcagattcgtgactgtattccttcccctagtttattaattcttttttttttttttttttttgagatgaagtctcactctgtctcccaggctggagtgcagtggctcgatcttggctcactgtaagctctgcctcctgggttcatgccattctcctgcctcagcctcctgagtagctgggaccacaggtgcccgccaccacgcccggctaatttttttgtatttttagtagagacggggtttcactgtgttagacaggatggtctcgatctcctgaccttgtgatctgcccaccttggcctcccaaagtgctgggattacaggcgtaacccaccatgctctgccttattaatttctaagagtcttcctagaacactgtaagtatgcttaacctggtattatagagacatgtaacagaactaaatactttccactccacaaaagaagaggctattttgaactacatgtatcttcacagaggttactccagtaagtaacttgtggaagggagggtcattggaatatggaaacagacaaaataaaatctgttcccttttcctcaaacctcacatagcctcatacaattaaatgagatcttggttacctctcagcctgtaaagattcccctgagtgtgtatgtgtcaactcctgtcttggttcattttatgctgctataacagaatactgactgggtaatttataatgatcaggctgcgtgacttatgatgaacagaaatatatttgggttatggttctggaggctgagaagtccaagagcatgctggtggtatcttgtgagggccttcttgccatgtcataacatggcggaagccatcaaacggagtagagagaacatgcgcaagggtgggatagaagggggccaaactcatccttttatcagaaacacactcccatgataactcatttccctagcaacggtattaatccattcctgaaaacagagcccttatgattgtactgccccttaaaggtctcacctctcatccctgttgcattgaggattaagtttccaacagatgaactttgggggacatattcaaatcatagcaactccttattacccaaatttatcattatactggtcaacctacacattacaaatttacatttaaaaaaagtaattaagatttgctaaacttaaaagatttataagctgtaaaaaaaatcaaaaacaaaaacaaaaaaataaaaagcaaataatctttaaaaaatatgtacattttttaaatacaatgtactgacctgaaagtagtcaagttatctatagctactggttgataaaggcaacagaattgacagctcccacgtctgtaattaaatgtgtgaaactaacaaatggaaataatagagaaagattatttttctttactggtcatgttgtgacatcaatttgttttaaatgatgagaaaagaacttaaaggatttgctttttattatagtgcaaattaatattcaactactgaactgaaatagatttgcataagagttatcactatcaataatcatttgaaattcatttttcccagataaattagaatctccagtgataacaagcaagagttatctcctgcatttttgaaaaaaggttaaaataatagctatttcctataactagatcttgagattggacataaaccttatacgtgcaactttccttatctgattttaagtttcctttaactgtaaacatgagctaatgccacatgaaactaggaaaatacgatggaatttgaaaatgatgttagatagataaaagtaaggaaatcctagatttgaatgacatggaaatgtcacctagttcagtctcctgtaggggtacatagtgcctctagctgctatcatccttaatgatctccaaggaagaaagtagataaagatcctttcatcatcagttgtaggactgccctcaaccctgccccaaatattagatctttgaactctcttttagcagtaaatgttatgtaggtattaatatatatcttaaataacatatatgacagagatgatagaggtaataataataagtaatcactctccttattactctgaaaatattgtatatagcagtaatatcaaccacaatcaaaatgccatatattgagtatttgaatgggctagactctcctctgatcctttttttaaaagcatcattccactagtttccattgctattatccatgaagaaatagagacttagagaagataagtaattggctcatttccacagtttgtaagggacagagttgtaattcaggagcagaccacatacttcaaaccctcctgaccttgcatcatcatacagtaactgtgtatctattgaaaatctctagttaggtcccttctgagctttctgatctttgaattaattattttccatttctaacatttggccatagtgtcattttccagcattagtcacttacaaagatgtaggatgtgctattattttaaatccacattcatcaagaaaataggcctaattggagggaattaaggtagctgcaatttcctgatgattaagcactagaatatgttgctaggagaaactggagaattttcttttttgaaagtctgaaagaaaagtacaaataaggtttcaacaaactctaacttgaaccccagtttcctgatttgctaaatgaatggtttagagtaggtgatctcccttgggtctccccaaccctaacaacccacaagtctgtaactttaagtagcaattggatgttataacctctcaaggtcatttttagacttctatattttgcttcaatgattcttgactctctttggttcagctccacattctggagtttctttcaaatggagatctcataagagctattatttaacagtatcccaaatgtgcaatgtacagaattaaatacaaccatgcatttaagactttaacaatcatagttcatcagcactatgtgttctttctcctatttgattaaggttaaacaacaagatgatgtttcctcattgggtagcattttaaagtgtattgtgtatgtgacagatgagatcttataaatgcattaggcatgcttattttaatatctaagcatatgcaaaagttctagaaatattttacatgcaaatgtctggggctccactagggcccataatagaactccatactctgtgacttcaaagccctagtctcgacaactaatcacttggctatttccaaatcaaatttcttcaaacaaatcaaaggcatttgtcctacccaaaaaccaagttctgtggcaagtttcacatttcaaaatcaagctgcttattgagatattcatgcactgaaaaaggcacacagaatttcctttaggagatgagacacacctttttatgctccaatgaattagaaatttctcaaagagaattttaacaaattttctttacacacacacacacacacacacacacacatgcacttcatcttagcagtaaaagccaagattcagaatttcagcccaagagatctttcattttctgaaaggttatgagcccctgagatttcattcctttcagagtcataattactgtgttgcttctgagttgttaacaataacactgattaaaaggaagacaaaaaaaagaagagatcgttcacatacccgtattaagtggcttcacaaactaggagtatttttaacaccacaacatttgtggtaagtacaacaaagtgtgtaattcactgggaagcagaacagaaaagatgggaatgataatgtcaaataactcactttacccagggctccctgtgggcaaggcactgggccaagtcctccacaggcattgttgcatttaatacaacaatttttaacaatttttaataaaagccctccaatgaggcacttttactgtagcatttttacccatgaggaaactgaggttcagagaagttgaataacttgacaagagtcacccagactcccaagcctctgttcttaattgctcaactatgctactgccttttcttttatttttattattattattatactttaaattctagggcacatgtgcacaatgtgcaggtttgttacatatgtatacatgtgccatgctggtgtgctgcacccattaactcatcatttacattagttatatctcctaatgctatccctcccccctccccccaccccaccagaggcccgggtgtgtgatgttccccttcctgtgtccatctgttctcattgttcaattcccacctatgagtgagaacatgtggtgtttggttttttgtccttgcgacagtttgctgagaatgatagtttccagcttcatccatgtccctacaaaggacatgaacttatcctttttatggctgcatattgttccatggtgtatatgtgccacattttcttaatccagtctatcactgatggacatttgggttggttccaagtctttgctgttgtgaatagtgccgcaataaacatacgtgtgcatgtgtctttatagcagcatgatttgtaatccttcgggtatatacccagtaatgggatggctgggtcaaatggtatttctagttctagatccctgaagaatcgccatactgtcttccacaatggttgaactagtttacagtcccaccaacagtgtaaaagtgttcctatttctccacatcctctccagcacttgttctttcctgattttttaatgattgccattctaactggtgtgagatggtatctcattgtggctttgatttacatttctctgatggccagtgatgatgagcattttttcatgtgtctgttggctgcataagtgtcttcttttgagaagtgtctgttcatatcctttgcccactttttgatggggttgtttgtttttttcttgtaaatttgagttctttgtagattctggatattagccctttttcagataagtagattgcaaaaattttcttccattctgtaggttgcctgttcactctgatggtagtttcttttgctgtgcagaagctctttagtttaattagatcctatttgtcagttttggcttttgttgccattgctctttgtgttttagacatgaagtccttgcccatgcctatggcctgaatggtattgcctaagttttcttccagggtttttatggttttaggtctaacatttaagtcttcaatccatcttgaattaatttttgtatacggtgcaaggaaggcatccagtttcagctttctacatacggctagccagctttcccagcaccatttattaaatagggaatcctttccccatttcttgtttttgtcaggtttgtcaaagatcagatggttgtaaatgtgtggtattatttctgagggctctcttctgttccattagtctatatgtctgttttggtaccagtaccatgctgttttggttactgtagccttgtagcagagtttgaagtcaggtagcatgatgcctccagctttgttcttttggcttaggattgacttggcaatgtgggctcttttttggttccatatgaactttaaagtagttttttccaattctgtgaagaaagtcatttgtagcttaatggggatggcattgaatctataaattaccttgggcagtatggccattttcacaatattgattcttcctatccatgagcatggaatgttcttccatttgtttgtgtcctcttttatttcgttgagcagtggtttgtagttctccttgaagaggtccttcacatcccttgtaagttggatttctaggtattttattctctttgaagcaattgtgaatgggagttcactcatgatttggctctctgtttgtctgttattggtgtataagaatgcttgtgatttttgcacattgattttgtatcctgagactttgctgatgtttcttatcagcttaaggagattttgggctgagacaatggggttttctaaatatacaatcatgtcatctgcaaacagggacaatttgacttcctcttttcctaactgaataccctttctttctttctcctgcctgaatgccctggccagaacttccaacactatactgaataggagtggtgagagacgcatccctgtcttgtgccagttttcaaagggaatgcttccagtttttgcccattcagtatgatattggctgtgggtttgtcataaatagctcttattattttgagatacatcccatcaatacttaatttattgagagtttttagcatgaaaggctgttgaatttcgtcaaaggccttttctgcatctattgagataaccatgtggtagttgtctttggctctatttatatgctggattacgtttattgatttgcatacgtcaaaccagccttgcatcccagggaagaagcccacttgatcatggtggataagctttttgatgtgctgctggattcggtttgccagtattttactgaggatttttgcatcgatgttcatcagggatattggtctaaaattctctttttttgttgtgtgtctaccaggctttggtatcaggatgatgctggcctcataaaatgagttagggaggtttccctctttttctattgattggaatagtttcagaaggaatggtaccagctcctccttgtacctctggtagaattaggctgtgaatccatctggtcctggactttttttggttggtaggctattaattattgcctcaatttcagagcctgttattggtctattcagggattcaacttcttcctggtttagtcttgggaggatgtatgtgtccaggaatttatccatttcttctagattttctagtttatttgcatagaggtgtttataatattctctgatggttgtttgtatttctgtgggatcagtggtgatatcccctttatgattttttattgtgtctatttgattcttctctgttttcttctttattagtcttgctagtgatctatcaattttgttgatcctttcaaaaaactagctcctggattcattgatttttttgaagggttttttgtgtctctatctccttcagttcttctctgatcttagctatttcttgccttctgctagcttttgaatgtgtttgctctagcttctgtagttcttttaattgtgatgttagggtgtccattttagatctttcctgctttctcttgtggacatttagtactataaatttccctctacacactgctttgaacgtgtcccagagattctggtatgttgtgtctttgttctcattggtttcaaagaacatctttatttctgccttcattttgttatgcacccagtagtcattcaggagcaggttgttcagtttccatgtagttgagcagttttgagtgagtttcttaatcctgagttctggtttgattgcactgtgatctgagagacagtttgttataatttctgttcttttacatttgctaaggagtgctttacttccaactatgtggtcaattttggaataagtgcgatgtggtgatgagaagaatgtatattttgttgatttggggtggagatttctgtagatgtctattaggtctgcttggtgcagagctgagttcaattcctggatatccttgttaaccttctgtctcattgatctgtctaatgttgacagtggggtgttaaagtctcccattattattgtgtgggagtctaagtctctttgtaggtctctaaggacttgctttatgaatctgggtgctcctgtattgggtgcatatatatttaggatagttagctcttcttgttgaattgatccctttaccattatgtaatggccttctttgtctcttttcgtctttgttggtttaaagtctgttttatcagagactaagattgcaacccttgccttttttttgttttccctttgcttgatagatcttctgccatccctttattttgagcctatatgtgtctctgcatgtgagatggatctcctgaatacagcacactggtgagtcttgactctttatccaatttgccagtctgtgtcttttaattggggcatttagcccatttacatttaaggttaatattgttatgtgtgaatttgatcctgtcattatgatgttagctggttattttgctcgttagttgatgcagtttcttcctagcctcgatggtctttacaatttggcatgtttctgcagtggctcgtaccggttgttcctttccatgtttagtgcttccttcaggagctcttttagggcaggcctggtggtgacaaaatctctcagcatttgcttgtctgtaaaggattttatttctccttcatttgtgaagcttagtttggctggatatgaaattctggattgaaaattcttctctttaagaatgttgaatattggcccctactctcttctggcttgtagagtttctgccaagagatcagctgttagtctgatagccttccctttgtgggtaacccgacctttctctctggctgcccttaacattttttccttcatttcaactttggtgaaactgacaattatatgtcttggagtttctcttctaaaggagtatctttgtggtgttttctgcatttcctgaatttgaatgttggcctgcctcgctaggttgggggagttctcctggataatatcctgcagagtgttttccaacttggttccattctccccgtcactttcaggtacaccaatcagacatagatttggtcttttcacatagtcccatatttcttggaggctttgttcatttctttttgctctcttttctctaaacctctcttctcgcttcatttcattcatttgatcttcaatcactgttaccctttcttccagttgatcgaatcggctactgaagcttgtgcattcatcgcgtagttctcgtgccatggttttcagctccatcaggtcatttaaggacttctctacattggttgttctagttagccatttgtctaatcttttttcaaggtttttagcttctttgagatgggttcgaacttcctcctttagcttggagaagtttgatcatatgaagccttcttctctctacttgtcaaagtcattctccatccacctttgttccgttggctggcgaggagctgtgttactttggagggggagaggcactctgattttcagaattttcagcttttctgctctgtttttcccccatctttgtggttttgtctaccttggtctttgatgatggtgatgtacagatggggttttggtgtgggtgccctttctgtttgttagttttccttctaacagtcaggaccctcagctgcaggtctgttggagtttgctggaggtcaactccagaccctgtttgcctgggtatcagcagcggaggctgcagaacagagaagaataaaaccagaagtcctgggaagaagagtgatatagtctggatatttgtccctgcccaaatctcatgctgaaatataatcccccatgttggagctagggcctggtggaaggtgtttggatgataaagactgatccttcatgaatggcttgggacatcccctttgtggtaagtgagatcttgccaagttcacatgagatctggtcatttaaaagtgtgtggcacctccacccccactctctctcatttgctcctgcttttgtcatgtgatgtgccggctaccccttcaccttctgtgttgattgttaagttttctgaggcctccctagaagccaaccaggcgctagcaccatgcttcctgtaaagcccgcaaaaccatgagccgattaaaacacttctctttataaattacccaatctcaggtatttctttacagcaatgcaaaaacagccaatacaaagtggtaactaacaacatgaaaaccagggtaagcttagatccatgctgtatttatacaggctggcccagagccaacacttaatacatatttgttgaataaataaattcatgggtgaattcaagacattgtaaaataatttatggggcatactggccctttgacccccactagtcatccagtccattccagcatctgtcagttagttgtccatgagtctgtaatggaacctggcttccactcccagagccagctctgcacaaatttgtgaagaacaaaatgcctacctggcagcctctaccttctcttgttctttgctgggactgctattttccaagcctgtgttctctttcacgctggccattgactgtccagaactggctgttgactgtccagcaggcccagggcaagctccactcatagaaattgtgtgatcatctttcttcttcctttcttttctctattccagtcagaatttcagcatttctggaagcaattgcttgtttgcttatctgccttcttcttcacacagtaagatatgtgaagacaggagctgcatcattattatatctccagtgcctggcatcgtacttggaaaaaagtagttgtttagtcaacatttattacttaaattaatgaatgaatgcatggatggatgagtgttctccattgcaaacattgcttatcaagattgcaggtatttgagtactattactattaattgttatggtaatattgaacttatttggaagtattactgttggaagaaacatattttgcaggtgtgtgtgtgtgtgtgtaaaactattatgttcctcatttattcaacaaatatttattgagtatgtactatgtgacaggcactagggtatattattatgttgttgttgaccattatcttccaccatccctttaaatattttaggagagttctctctctctctctccctctcgctcttgctcttgctctctgtctctctcttcccctctttctctttttgcatgtggatgaaaattccaaaaggatctataattttctgcataatagacatcctgaaatgccttgacgtcagaaacacagtctcaattcaggaaatatgatttgcagttccatggaataatcaaaactctgaacttgagtaaatattaagccttctccacttccaaaggtggagccctgcttcaaggaggggtcacgggacttaggtgcgttctccgccctctccatgctgacctcttttctcacctgatctgcccagctcagggctggacaagaggtgggagggaagaaaagtggataggaccttagtctcactagttcttactcgctgttagttctctgagcctggcgtatagttccagttgtacctggttgaagaagcttttatgtcctcttcagagatcccccgacaggccatttctggtgattcttccctaagccccaggtagctggagggcacataccctcggtgtaaatcttccagacagactttcaggtatgatgtaagaaaatcccacacttgctgtctcactcacatggccctcatatgcttcatgggaaacatttacatccctgccccgacagcctctgggagttaggggtcagttaggcatcagtcctctctatctcctgacccgaaaatagcccacggacctttcgatgaccctcttgcatgtcccctctccagacctgaggtagaaataggaaggtggagatggctagagaggcgagagttttctgatgagattcctctcctgactctcctgctcaccacactctaggcctacttgaattctcaaagcagatagtaagttctaggatccagagacttaaaaaaaaatctgcatttagtaggttggccttggaaatttccattttattttgtagtctccttagacacttcaattttgggcacattattgtatatagtatatgatatatacttatatgttatatattatatataagttatatgagatatatatttatatatcaatatattgtatagatagtgtgtgtgtttctatgtatctcaagtgttttgaacacaacttgcggaatgcaataaaattattttgccacctctccctttaaaatatattcagttctttctctgctcctggatgaatactccacttgggcattctcagagcttttctaatatctcttggagaatagaaagtattctggtctcttaaagaataaaatgttgccacaatttgatattttaagtgtccagttccacgtaatagtcaaacctcccatcttcattcaaagttacacctactccccgtcttcccagtgggcctgcagtctgggaatatgatgcatttagtttcttttttttctttttttctttttttttgtttttttttgagacagagtttgactcttgttgcccaggctggagtgcaatggcgtgatctcagctcaccacaacatccacctcctgggttcaattgattctccttcctcagcctcccaagtagctgggattacggacatgcgccaccacgcccggctaattttttatttttagtagagatggggtttctccaagttggtcaggctggtctcgaactcccaacctcaggtgatccgcccaccttggccttccaaagtgctgggattacaggtgtgagccaccgcacctggccaatttcttttctttttcttgctcctcactgccctagctagctgctatttatagaccatttggagttgaagcaagagggttggaggagaggcaagatcttacatcaacagttttgctgtaagctggcctcatattttctgggtctggccaatattaaaactctttgtctcatgggatactttcagaggttctttgaaatgcccatcccaccactgtgctgggaaactttcagcagcacagttctcttgatacagatcatgtattttcctgacttgtttcctacttcttccacagtctctaggaattgggaggtggtgttcacccctggcttccacatgctgagttttcagtctcccatctcaaaggccccattgagcaggatggagtaagcacaacctcattctgagtgccttgtttgtaggcctgtgtttaatctaagggaaacataaaacctctactcctagaaactctaggagacacatctgccattgttaccactggaagtgagatgccagttcactatatctccccagctacagggcatagataccaaatttccaagagattttgtcagaatctctttcactagtagaagtgaaggggcaagcactcctttggaagagggacatcaaagtacagttcttgctaaagaaattccccctcaaattctttcttctctcaaaccttttatatcctcagtgtgcctgaattgtctacaagccatgtaattagtttttgttatctctttttcaagtcctacaggctggcctgttgcatagatcattttcgtctctgataaccgtgaaagctgagtgttcagccaaaatttccaattaaacatcctgatatgtacataattagatatacacaactgtcctgtggcatcagcagcatatattgttattcctgtttgatgtatgagtaacctaaagtacagacaagtgaagtaacctgcaccatgactagttgggttttctcactccatgtcttcactctttccctgactgagttaacacattgtccttttaagaacggactgaaggtccagcgagtagatgaacagaagtaaccttattggtgttgcacaggcctacaaaattactaagaagtccttacaacaaataaatataacacatatttcatgggaagtaaaataaaatagtagacttaatgatggtttagaataagtagtattaagtaaggaaaatagactgacataaaaaagaaacaaaaaaagactgaaaaatataggtatagtaaaaattaaaagaaaaacattatctattattgaaaattaagcatctgattatgtgataataaaagcttaacgtagtttgcccaggtttgaaagaaaactgattgacagtcgcttatcaccaataatgaaccccacctgtgccatagaaagtgtcttgggacaccaaaccacccgccaacccccatgttgtaacatcacagtagtacaaggatgtagatgcaccaacctaatttgaatgtgaagtagtccgtggtataggacagcatacgtacaagcccaccctgagggaaatactgagcaagaatctaggtgggctgaaaataagagaatgaataaaggaaggagaacagggttaaataaatatgtgagatgaagcatatggtttgagaagttttggggtcccacagatctattgcagggtactactggtaatgacactcatgaaccatgtaccttcacctgttctactaactattttcttgagtaaagaggtcatcttctggtgccttgggattgggactgcttaagtcatttctaaccctacattcttacttccctttagggttaggcctagaaggagaaagaggaaggacatgaaacaaagagttgacaccttctttttttttttttcttattttaaaggtaccatcagacctctcttatacttcattttacttcccaccacattcaatttcagattttttgttcaattgcttatatcatttagcaaccattcaaaattgaatgctgcctttggaaataaagaacatctgctctaaatcttgttgtgctggagattttgcaagaagctagagaggcagatgctgccatatagagttggcaaagtccaaaagacatgacttacaggcacaccaagcctagagaaactgataagaagtagtgctgcaaaataacccttagaggaggacttgtaaagcaaaggaatttagaggatactagaagtagaaatgtgatccaagtatgaaataaaaacacaatagctacagctataataccttcgcctctagtctcttttctcaagcctagtcttcactcctgattttgcactgtgatctcaaagtactgattcctgattttgattgaccatttctcaaatttcccctattaatttggaatcttctagttttctacatatgggccttcctggaccatacacagagaatgcctctctctctgttttaaatgggataacagatatagatgttatctccccagaataaaagagagtacaaatgttgggtctgacttctgtcttattattattcagtttggtctgatttcaggatctgtttaacatgtattgatttatctgttaggcccactttgtcattttaacatgcatattaaaaaaagaagaggtattgaattcagccattcagatctttttcaaattggaagcaacttcagaaatctccacaatctgaaaatgttcctgtgtgtagggccatttcctcaggggatatgaacagtttcatgaagatgtcccacacctccagatttgtcctctttttcatcagagctcctttcttatctttgcctgggcccttaggagggctttctgccatgtcagtatcctgtcaatttctacaactctatgaagtttttcacatagtagaatatattgtcaaaatgtcttgatgtcttattacaacctttacccaatctcggcagcaggatttctgaacacactcctggtgcctttttcctgatacatttattatctattgtgagagttaaatggtatctcgaccacatcctgttcttcctagaatccatatcaccttaaacatctagtagtctcatttctgacattctggtggggaaacctatttttaggtaaagttgcttatttttgttggaggaacgtttgattttactaagtctcttaagtttcttgaattaggttttctaatctatttgttcattcacaaatatttattgagtgtatattagagttctccaggggaataggactaataggatgtgtgcatgtgtatatatatatatatatatatatatatatatatatatatacacacacacacacacactttccctactttcttccacttattacccttggctgaagcatgaaaatatatttcatgtgtataaacacacacacacacacacacacacacacacacactttccctactttcttccacttattacccttggctgaagcataaaaatatatttcatgtgtatgcgcacacacacacacacacacacacacacacactttccctactttcttccacttattacccttggccgaagcatgaaaatatatttcatgtgtatgcacacacacacacacacacacacacatatatatgtaggaagagatttattgtgaactggctcatgtgattatggaaattgacaagttctaagatttgaagtcagcaagtaggaaaccccaaagagccaatggtatagttcccatttgaaggctggcaggcttgagactctgaaaaagcagatgtttcagtttgagtctgaaggctgaaaaacatgatgtcccagctcaaggcagtcaggcaggaggaaattccctcttactcatgagaaggtcagtctttttgttctattcagatcttcagcagattggatgaggcatcccccacattaggaagggcaatctgctttactcagtctactgattcaaatgttaatctcctcccaaaacaccctcacagacatgcccaggataatgtttgaccaaatacctgggtactccatgagccagtcaagttgacacataaattaaccgtaacatgtacatactgtgtgtatgccaggtacttacttaacagatccttttttactgttaattttattattataaatgtggctgagaaaacagtatattcttcgtaatattgttgcaaatgaatcaggcagatatttaagggtaggatttcttgttctgttgggaagatacgtatgactgcctttgtcatctcaaacaaagttgcaaaaagtgtcatgacttagggtaactaatggtaagtaccatggtaatcaatccctaaattttctagtttaatttaaaaaaaattatttctaacttacttcactgtctgatgaaggccaggaaactctcctaggtaacttacctccaagttgtagaattcaggcccctttcatgtgtttaaatataacctttttttcttcccctccaactccccttcctaaagataaacttttaaatcaataggtatctcacagtactttgtgaaggaaggtaaaataaagtcaactcgaaaattgtatatttaattgattactgacctctataatttaaaagctgcttgatcttggacaaataattctttttcattgatgatcttggaacccagtgggaaagaactacagaacgaaatggtaaatcaaatatcgaagatgttttgttacttgaggaatcttctgttaggttggtatagcggaggaaaccttccaattgagttttgagtttaagtaacaagttttgctcatcaagctgggcaatctgggcaaaccaattaaccactctgggctttggtttcctcatttgaaacttagcatgttagccacactgattttgctaacatcacttccaaatcaaaattgcaattattctagtagaccatctctttagatctggattaaggatgaggcctacttggaggtgaaggaatcaagtagaaagatgtgaaatggtccctccctccatatggaaaaatctgcctgagatttagacagacactattcaaaactgtaagtccactgagcaccaactgcggtacaaaaagttaagttcccaggtctcatttacagagtagtagctgcttgttagttatcacacgccagtgattcagctggagaagctaaggcagaaggcaattatgtaaccatcacaaaagggtatgggggaagcacttgaacccataccgggcattctggcttctggtcagatgcgagggatggattcaatgtcattttaatctttattcattgtttcaatctgttagaactgttatagtttggagctccatacagaatgcagatttgttcaaatgacttcccaagaacttgtagcaagagcacttggagccatcctggacaggcccatgctgtgcctcacacatgcacagcatcttcaaggggtcatacagaaactgcctccaaacctccccacccacttccactttgccacaaccccaagagaggacacccatctcaaaaaggtttgctttcctgtggagtaagaggtataattaaattgtgtcccagcagtgaaggttccttaatgataatgagccaaaactaattgtattgatttgtttatcaccggcttaggaggcccatcaaacaaatggactgagactatttccatattcttatctgttaggtaaatgagaaacaaatgacctctccctatgtctgcatcctgaagtcactgccctctaaggctgagtgctctatggcttcgggtgggagctttgtccaaagctggggccattctgccctctggcttcttcaaataggtgaagaaagttgaaaattttggtattcattcttctatttttcatttatgtagaaggatttgtttttaacagttacaatttggatccttgccaaaggtgccagatggcctgctttcttcgggagagctggtcatgagtattaataaccctaatttggaattctctgtggaaggggtagccacaagatttggagtgggaggaaatgtagaatcattgataacaagtgaattcagagaaaaagactcttgaatcttggtcaggagtgagacataacggtaggcaggcagctttggggggccacaggagaagcctgatgtacctgcacctacccctcttagtcttggggagccttcccaatctactgctccacaaattaagagaaatagagagaattaaaagagagctctggaagagccatagcaaagtccagagttaggttattgagctcaagtggaaagggataaaataaatggcttccagaatgtgaagaaattagctgcaagaatgtgaaactaaacagtggatctgtgactattcactttcactgagatgaaggagcaaagctcaacctagtatttagaaaagatttagggggacatagaaagaaaaccaacatctattgagttcgtgttctcctcccgttacttggctaaagagtggttaggagtgagcctgacatatattgtttctttaattcttttgcctagcccagcaggtaggtatacatatcccattttggagaggaggcagctatgtgtccagttaatgtttgtaaatttaaagccactatcatctgcatcaaagcccatactctcaacggctgaagactgatatctcactctccttcctcatctttccaatagaaagcaaggagttccattcagcacctctatgtgggcagtattgaagaggatgagcctttcttcctgtctcacttgcccttacgctcttcaaagggagggcctcatctgaaaagggagatagcctgaagccctttgactgcattgatcagggacaggaccatgatattgttacatacctaggtcaccctatggctgagctctctcttatgccctttacaccaatctgtgtcctgctccaagggccttgcccctgtgactcttattcagtaaacaggccacacagctgcttctggtagcccaggcagaactctgagcagaatcctggtctctgtttcagtttgcacctggtggccaagtcagagttgtaaagtcccaagatttaagtttagagaaggttgtcagagatcctttcatattccccaattccttttatcataaatacagctgatgctctattttcatcaccagtttgctctttctttttatcctcaattgattagattccctaggaaaagaggagtgagtacataggtaatttttctaaacaccaatctctactactgatgagacaaatggggagctttccaaatgtgagggtcattcaggtgacctgatggcttatggtgactgggatggtttaaagagaattttgattaacaggagaaagagttttttaggaaacctctaaacttgcttgaagctgatttagttgatcctgcaaagctgcgctatttttcacctaattcgagagtttattttagaggtattcatcttctaaaaatattttacctttaaccaccattttcggacataaactactttatcatttatgtagactttgaggagttaaaagcttttggtaaatcttgcctcctttgattcgcaacaaagcagaaaaaaaaaaaacggagaagaaatttcctctttgtaaaggaaaaaatttatttaattttaaatgacttgtccaaggtcacttggctggaaagtgtctgggaagagactctgcttttctgtgttctgagttggccttaaattattgcaatacttcacatacaaaaataaaaaagaaagataaatttgattatataagaatgtaagtctcctgcacagccataaatattaattaaacaatataagataaataacaaataggggagtaatttaccccactagacaacagggttaattttcttaatatataacaatctccttgaatagcaataaaatgtataaacaaccaaatacaaaataggcaaagaaggaaacatgcaattagtcaatgaccatgaaaagatgcttaaacttatatagttaaagaaatgccactgacttatcatttttcactaactggcataattaaaaatcttgatgtaatgttggtaagaatatggggaaaaactgttggtgggagtataatttgagacagcttttccggaagggaattggcagtatttattgtaacctattagtaatgtctgcaatatctggtagggtgtgaacattgagttccattagcagaaataaagtattcctggagttacaggataaagcacttatcaaaccacacagagtccaaatcatgcaaatcagaaggcttcctctctaatcaccttattaatcccctctcttagcttcctccacagctggtctttttatctttcaggtctttcccaggtttgcagcttccacgttctcggttctactcagttctcctttggtaggagcctgttttgttctttggaccttgggctttagtggaggggaggggtccttaggaccttcacagtgaaaatgtactcagtaataaaacatttcccttgctgattttgactactacttataattcaaatgtgctatgctaatagaacctccctcttagtgtgcaagagagaaaatgaaggaggaatgaaaaattataatcaattacaatataaagtggcccagaattgacagatggaggaatctattccatggatgtacttgcaacagtatctgaagatacatctgagaaagtaattgaaactttgtaattgcagaacataaaatgtaaatagccgtaaatagacaaccgacaaaataaagcatggtgaatttctaactggaatactatgcgatccttaagaatggggcagatcttccattatgctctaatagaaagttacctagaatacaaaagaatctcatcttcttcaatgtggagatttaaaaaaaaaagcctttggccaacttaaatatacatgcttttagaatcataaatgaaattattgaatgtttacttatatttaatttattaatctagttacacattcacatttaagattgcatatcatataacctattacttcagaaatatttctactttttgcatttcttgaatcagtattatatgaatacttcacatacatttttgacattagtcttttacaagctggagctgctttctgagtcatctgatacatattttttcagagtacattttccttatttccatctgttacttgagatacagcatttgttgacccacatatgatgctatcactggcaattttatcacaaactacaagtacccattcatagaacatcagtaaaactgttttattaagattcattctgtagggctgtatgttggatctcacaacacaactacttattctgttgctttgtaaataatctttgaaaggcttgtttttacaattttaagcttgaagctttttgtcttactccaagaaataaagactaatctgtgataaatttattttccccttttaatcaatgtcacaggtgaccacaataggtatacaaactcatgttgaccgagattgtttcaggctaatgtgtctttcccaaacaataatctttagttcaaaattaagtaataaagaaagcttctcataatctcagagactttgcaaagacctggtgataattccctttcttttctgaaagataattttagcagagtaacctcatcatttactcaggcatttgtggaatgtatatagatgtacactcaagtattcaagatatattctgaagtaaaaggacagattgtagaatagtatttacagtgaacccatttgtagaaaataaaaaggctacaccagtaaatgttatctataattatatgtaactacatattcataaacccttcctggaataatacattgtgattaatcctaaggtagtggggggaagaccccaggaggaggaggaagactggaatgttttctctttttacccttgttccaatgttgtcagtgatgtattaaatgaaaattggttttaaaatacatgcctttccttttacttcctcccctctccctccccctacaagctatttctcatttggagttttgcttgctattatcttgagccaaattaaaccagtgatctcctgatggaaaaggccagagcctgttcaatgactccagcccctttcctgtccattctcctctggagccatcaccaaagccctggtcacactctgtaatttgtaaatcctgaaattgtggtttgcaaggcaaatgattcagagcaagggctttatcccgggatcttatcctcctagttgcacaaaaacaaacaccagggacaagaaaattccttccttccttccttctttcttttttcgtcttctctttttattctgggtaaagggagctaaaaagcaggagaggaggtcagtttgtggaaaatgaactgaaggaagtgaattgtaagagatgggtcaaagaaagaaaaaaaaccacgcctaataaggaagctaactgcagtttttccaaataaattaaacgaaagataaagaggcaggctatcaaggcagcctaaataaggacacctcaaaaggaagaacgaggaacaaagcttcagaagcttcaacaggagaacaaagaggaagaggaagcggtgtttaatgagtgcacagtatgaagccggaggctgactgctttggtttgctgttagaatctccagctaacagtgcctaaacaataaaagtttatttcttcttaagacaagcagtctggatataggcagtcactggaattgattcaacaaatcaatgaaatcagagctcctgatcagttcagcaatttctgtgatacttttctcctcttcaatgttcccacgttctgagacggctgcagcagcatcaagcatcacatactcccacaatccactttcaaagccttgagacaaagggcaacacaggccagtgttgctcctcctgtgcgcctcttatcaggaaaaaaaatatctttctcagagccccacagcagcctccctttatatctcatgggccatagctctgtcacaagctcaccctgttccagggattgcctctacctatttgagatcaagggatctcttcctgttacctaaagaaaaattagagcactgttaattagcaagaaaaggtgatgtcttggaaaaagcagccaacaacttctgccacattaaataatctccataaaccaccttttgaggtaactattattattgccatttgaattagtttgctagggttgccaaagaaaaagaccacaaactgggtgcctgaaacatcagaagtttattgtctcatagttctgaagactagaagtccaaaatctggatgtcagcagagttggttctttctgagggctgtgaggggcagatttgctctagacctctctctttggcttgttaatgagtcttttcactatatctcttcacataatcttccttctctgcatgtctgtgtccagatttcctccttttatagagacagcagtcagattggattaaggcccatcctaacaaccaagtaagttaacaatttcaacttaattacctctataaagaccctatctccactttctgaagttggggggtaagtatttagacgtataaattttaaaagggcacaattcaacctgtaacaccattgtacagaagaaaccgggtagtagagattagataacttgcccaagaccacagtagctccaaacgtacacctgccttacaacaaacttgtgttctttccaccataacacaagaaaacaaaagttaataagtgagaaatagagtgaatgaacaatactaaaatatttctaatgcatatgacagaggtgtaggactattataaggatgtgtgggcaaaaatacagattttcagctaaaacattttaattcgtatctcagtgtaggtaaggttgaaattaagagttgtacgctaaataacctgaaacggaacttacaagttgggtgctttaagctctatacaccaaaatcaatgaagccatgaaaagaatataaggaagggggcagagaggataactggctggccagcactgtcagcaagcaggatttgccaaagagaaagtcatccaatggcaacacctctctcagagctcactctcttgccttcacttctttgttctgaatgtgtgtcccactgattctcgcattcctacaaacttgcatcctgactgcccaactcccctccatttggcttagctctgccgcagtcaggcaggaagaacgcccactggggcctgctcatttgcttttacagttttataccactgcaacttgctatgcctctctttcccacatctagggcaccctttagataggaatgctgggttcattcctgctgaggtgttactgactggtaatagcaaaatctgttcctgtcttgcaggatgaatgtgtacttttacagagaatacagtctcaattcaaagaattcttaatatttttttcccacaaagtgggtagtctaataagatgtagaggagaaggagctttgagaaagctggagaagtcttgaaatctggacaagtgtgctagacactgttagtgactgcctgctctaaacattctgttcattgcagtagcaatagtagtagtagtaatcagctgaaatgtgtgtttggtcctaatcaggactgaataatctggaaagtctttacaaactcggctcaaccatcccctcttccagaaggcttccctgactacatcttgttcactttctgggttggttgtcctctatggcatcctcacagttccctatccattctaatgcattgtcactgttggtttattggacattcttccccaggcaaccacaaacttttcagaggaaggaactgggttttttatctctatatggcaagtaccaagcccagaacctggcatgttgctgatatttgtattaggttcctaggctgccatagaaaattcggtggcttaaaacaacagaaatttattctgtcacagttctggagaccagaattcagaaatcaaggtgtcagcaatgttggtttcttctggaggctctgagaggcaatgtgtcccatgcctttctcctaaattctatggctgctgactacacctggcattccttggcataaagcagtgtaactcccatctctgcctccttcttcacatggaatttccctgtgtgtctttttatctgtttcttcttctcttataagaacttgtgattggatttaaggcccaccctaatccagggttatatcatctaataatgatccttaccttaattacatctgcaaaggcctttattccatgtaagacgacattctgaggttctgggtggacatagttttggggagccaccattcaacctgatacaatattgaataagtatctggggaataaataaatgaacagtcaacatggctccaatatctagtgtgaagaattatactttcataccacatgaaagtaatctgtatttaaagtatacaagaaacccaactgatgctcgaggaacctttatatgcttgtgttaaatggtaagactaagttactttgggctttcactgtatagagtcttagatttgaaagaacctaatgtgttctttggccctggaatgtgatagatcatattaaagtgaggttttaatattgtaagatttatatgatttgctatttgagcttttctaaactattaagtagtagtatctattagtgtcaatactaggtattcagttattttaataagaagcatattaataggatcacatgcactgtcatttttttctatcgtacttcagatgtggcctcattcaaggatagagcagtcagaggcttccagtatttctctctcatacggtaatttcacacttgaaactcagcatacacaatgaggaaatagatatctttccgtcatagtcctgctaaacagaaaacaattctctattagttaatgtggccaaatattttctggtacctagtagaagcattatttttagtagcgatagaagcaggaaatgggaagccaaagctttttttttttttcagacagagtctcgctctgtcacccaggctggagtgcagaggcgcggtctcagctcactgcaacctctgcctcccgggttcaagcaatttcctgcctcagtctcccgagtagctgggactacaggtgcgtgccaccatgcccagctaattttttgtatttttactagagatggggtttcaccatgttggccaggatggtctcgatctcctgacctagtgatccacccaccttggcttcccaaagtgctgggattacaggcatgagccactgcgcctggccaccaaaactatttttaaaatttgggtatatgtcaaatagcatttagacattaatcaaactacagcttgtcctacatcatcaattattgacaccacagggaatgattgtcattcacttataaatagctccaagcaaaacctagacagggtccagaatggcaagactcagtctaactttagaattttatttccaaagaagcaaagatctcaataagtttggaagtagaatcacctcaacatccctggagaagcagatctagtccctctggctgtgcattgcttgaaatgcagtgttgtatcatatattaaaacactgaaaatggagttcagcatggagagccctaggctacactatcatgaatctttcacctttgctaatcttaaagtcagaaataattttaaaatagatgcatggggcaacgtgtgcatggggaaagtgggtgcagcttaaatttcagtgccaggaacagtgtcgatttggccattcatacctgtcaatagctgctgagggtaaccttcttatttaactgcagagaaaaaaaaagatgaaatatgttcatctcctaccttgagacataatcattatttaataaggcactatatatgaaacatgggctttatttgacacatggatatgctaataagctccagaatattgctaggctctttgaaatggaggctgtgagatcatgatagtcagtcgcttgtttacaatacatgtagaaccctttactctgctgaatcttgaggcccttgcaaatttgtattagctgatgtctacgtggtgcagggaaagcaaccatttctggtactactgacatacgacagaagtgatattgcattaaaatggaaaagaaagagaagactcatatcccaggaaggaaggaatctgggcctgtctcaggcaaaactgtgaattaaatgaaagatctctaaaacttcatatcttggcctaatggtcacttttttctttcagtggtctgcttaagcagattttaattgccctgaggctttctttccctggctgtgtgcatcttcccagtcacctttgctgaggttatcaacatagcaaaaccctccctaggttgtgccacatgctccagactttcccaacccatttctcaaaaatatcaagtaattactgcgtttggttccatattgggggatttatctaggaatatatcgacatgcttttctttccaagacacatttatacttgaaggtagactgcgaagttttattccaaaggagacactaataaagggcgtttcaggttccaggcaggtgccttggctagtgaaaagaggcagaccgcggtagacaatatgtctaaagaagcttggatcagatgacaacactcaaatcatgtcacaaaggcaatcagctgtcacctctccatgtagggaaggccgtggagaaatgactggaagtcaatagaagtaaatatatatgaatgttgacatagtggagtggagccttggagcatgagtgaaatagcagaaataaatatttaaagtgaacatttctttgggaacaatgaaaagtgacatgcagttgagctctggcagaagttttcagaaagaagcaagcaggatcaaacacatgcctctgctgttcattatttcacaaacagacaaaactcaaattctgactagtccagagctatatcgctcaggagctgctgctagcttcaatcctgttggtcctaagtataaggtaggtgaacttggagggagaggtcgctggaggaggtaatatggtcaagtaaccagtgacacagctcaagaaatcatctttattggacatatttattcttttcacttcttttttccttttcttttttaaaataaaacagctttattaggatataattcacatgctatataatttacccatttaaagtgtataattcaatggcttttagtatattcagagttgtgcaatcattctcacaatcaattttaggacactttcaccactccaaaattaagccgcatacctcttagccaacacctctcaggccccccaacacttgctgggcccttgaaaccaccaatctactttctgtctctataggtttgcctattctggctattccatataaatgcactgataaatatgtggtctattgtgagtgacgtaatgttttcaaggttcgtctgtattgtagcatgtatctgtacttcattcatttttatggctaagttatactctgtcatattatggaaataccacagttcatttatccactcatcctctgacagacatttgggttatttctactttttggctattattatcatgtggttatgaacattcctttacaactctttgtgtggacacaggttttcctttctcttgggtaaatacctagaagtggaattgttaggtcatatgagaattttatgtgtaggcttttgtggaagtgctagactgtttttcaaagcagctgtacccttatacattctcaccagcagtgtacaagggttccaatttctccacattctaaccaatatttgctattacttgtcttttttattatagccatcctagtggatgtgaagcagcacctcactgtggttttgatttggactttcctgttggctaataatgttgagcgtcttttcatgtgcttattggctcctttcacttctttaccttgactagtagactcgccttagatcagcggtttccaacctttttggcaccagggactggtttcatggaagaaaaattttccatgaggtgtggatgtgggggatagcgttagattctcataaggagtgcacaacctagatccgtcgcacgcagagtacacaacaggattcgtgctcctgtgagaatctaatgctgctgctgatctgacaggagatggaactcaggcagtaatgctcgcttgcccaccgctcacctactgctgtgttgcccagttcctaacaggccagggacaggtaccggtctgtggccctagggttagggactcctgccttagaggaatttggcccactactatagttatataatgacaggaaaatttcaacattctaatctctgtggacaggacagctcccagagtctgcacagaaagacctaggaaggcagcattgtgtttgaagttcggcacctgggacccagtattgctgaagcataaccccccggagtctacccctacagccccagtgttgctgaggaaggcatccaaagagacttcgggaagggtagtcagagaatgcagagagcttcacagcaagcaccagccaggggcttagctggaccccaggtttctaggtgatcatcaggtagcatatactctgtgatcttctttcatcctccccatttattctctacagttttacagctaccggaacacactgtcacttttacattatggaaaagttgaaaatattcagctgatttctgagaaactgggcatatttctcattgaagaaccaataagaaaattttttgtcacatcaaagtagacataaatttccaggataaaccagatggtgagtttagagtgtcaacttagtaaggacaatatgcatttagaataaatactttaccaagtaggacagaataggctaggtctgggatgcttctaacatgagtctaagagttgaacagcttgtcatttttcaactcgtcgataaatgggaatggaattatttattctggaaacaccaacagagttgttcgtcaattgttgatgtagtgtaaaatgattttaatgcttgtggtctaagaaagtatctctatcactcagtgcagtctaggacaaataaacaggcaaacaaacaggaaaacacaaattggaagataaataaaaggggcagcaggcagtgagtagttgttacctaatttgcattcaaagaatggtttaaagaatattggcaggaatccagtaaactagcttgagtcagatgaacttcatattaagaatgggtggaaatttataatattggggtttggctgatgctacaggattttcttggtcagaatcataaaaagatagagaagccatgctaattctgacactttgaaatgtaagagcagttcttgaggtattgaatctacatgaaagggatggaataaactggaaatgatttataccaacgagatttgagttaggggaatgtgttagttttctattgctgctataacaaattatcaccaactttgtggtttaaaacaacacaaagttattttatacagttcgaagttagaagtctaaaatgggttgttagggctgcattccttctggaagatccaagggagaatctatttctttttccagcaaaaaatgcaagactgcctacatccttggctcacggccccactccaccaatttctgcttccattctcacatatcttttcctcacattgctgtttctctatttctcttttaaggacccccatggttacattgggccagaataatccttcaaattcaagatccttaatttaattgcacctatgaagtcctttttggcatgtaaagcaacatattcacaggtttcaagtattagagtggggatatctttagggagctattattctatctaacacagggaaaaaaaggattttctcagtcctttaagtatcagcctgacggtgacagaaagtaagtgtttgttttctgagggctgagactgatcctgtagggcacagttaaaacatagtggttctgccctgaagtgtcatctgctgctgatgaaatcaaaggcttggatggcatagcttttccctgttagagtaagtaatcacagcattaataggtaggacatgatttaacccacagcatactaggagctctggccaacaactttaaaatgggtcttcaccatttggaggcatgattatgagctaaaaatactacgtgtaagatattgtggcctttgatttctacccttcaccaaaaatatcttgaggactttgtgccaggtgggtgctaggaaaaaaaaaaatgagacacagcctttgcagtctagaagccagcagccagttattacacataaaacacaagaacatattatataggaacaatagagtgaggtatggaaccagagagacggaacctagaaggatggtccaagaagtagaaagtgaagacagagtatagtggacccaagaataataataacaacagacagttatatggtgtttcctctaggctatgcactatctcagatctgtacacagatgctccttgacttatgatggggttatatttggataaacccattggaagttgaaaatagtggaagtcaaaaatgcattcaatactgtacacctaaattaccaaacatcatagctaaacctggcttaccggaaacatgctcagaacacttaaattagcctacggttggacaaaaatcactaagcacaatgtgcattttatgatgaagtgatgaatgtctcatgtaatctgttaaatactgtacaggaagtgaaaaccagaatggtcgtatgagtgctcaaagtacagtttctactgaatgcatgttgcttttgcataatcataaaattaaaaaaactgtaggtcaaaccatcataaattggggactatctgtatgtattaactcatttaatcctcataacccaagcctggtaaattggcttcccagatggggtttctcaaacacatctctattttccctcccagctgttaccactgtagttcaggacatcagggtcttttgccaaagcttcctatctagtgtccctgccctctactcttatcctacaccaaagtgatccatttataaagtaaatctaactgtgtgacttaaaacccttcaaatcttgctcagaagagagctgacatcctttaactctcatttgaagccctcaagtgtctgacctcagtcctcctctctgacctcacctccaccttctcttttccacccactctcatcagttacaatccagaaagagtggattccgcctcctggcaggcagctgtgctgtttcaggcccatggacctgcctccaccttttaccttcccccactcactaactcctgctgctgctcacatccctagcctgtgtgcggtgcccctcccctttcctcccacagtgacctgagcacagctcgggtatttatgcctctgttctccccggtaggtttaaagattctttagagcaaagatacagaattttcatcttcccttttccagcccttgtgcagtacctggcacataaaagccattcagccaatgtttgttaaattcagctaaactgagcaggaaacgtctcccttgtgtgtggctgtgcctttttgccattcagagagaggcagtacaatcatggtgatttgaggacacttaaaaatggaaagggctccacatcgaaggcctcttgaatatagtgaaaatgaatatcaaaatcaatatgccgttcagtttagggatatgaataaatgatttcaaatgaattcaattttcctctcaacattaagtggtgaaggaaaataaattattggataatgtatttgaagtaatagctctcttctaactgttcctacaatttgttgttacttgtctttggacctctgtgtgtcatgtgatactgtgtgtcatggcgatctgagaaatatttatctctcctcaccttctaaaggtcagagactgtatcttaggatccaagtttggaattatttcctgacattaatctcttcttcctctgtgctcccataacataatttcttctttttaaatggttgttttaaatagaaaaatgtcgtacttgaatattttgatttttatgggggaaaaatttactactatgaaaaaaatagaataaaactatgtgaaagaacgcctccatttctccttcaaacccacactgctgtccacaggtaatccctaataagagtctgttcctttttctatgcatgtatgcatccatgcatacaccatgtatttatgtgttgttttttgttgcttcttgttagtagataaaattaaaattatactctcagtattattctaccacttgagtttttttaagatgatacttctaaaacttttttattgacacattttataattacacatatttatggtgtacaatttgatattttgatacacatatgttgtataatgatcaaatcaaggtgtttagtgtatccatcacttcacagtggtggaacattcaaaagcttctcttctagatatttggtaatacacaataccatcctattaacaattgtcacctactgtgcaatagaacaccaggacttattcctcctgtctaattgtaactttgtacccgttgaccagcctctctctatcctcccttcttgctcctctccctaatctctggtaaccactgttttactctctgcttctattatatcaactctttatttatatacacacaaacacacacactttttttcttttcgataacagccattctaaatggagcaaggtgatgatatcgcattgtggttttgatttgcatttccctgattattaatgctgtcaagcattttttcatgtgcctattggccatttgtgtgtctcactttttcttttgaaaaatatctatttaggtatattgggttttttttcttttgtttaagtccctaatatattctggatattaactccttgtcgaatgtatagtttacaaatattttctcccattctataggttgtctcttctctttgttaattgtttttcttgctgtgcaaaaccttttaagtttgacataattctatttgtctatttttgcttttgtgtcctatgcttttgaggtcttatttttaaaatccctgccatgcccaatgttgtaaagcattccccctatgttttcttctagtagtttcatagttatagactttacaattagcctttaatccatttagttggattttgcatgtggtgagaagtaagggtctagactcattcttctgctcgtggatatcctatttttccagcactgtttatttaaaacactgtcttttctataatgtgtattcttggcacctctgttgaaaataagttgaatgtagctaggtgaatttatttctgggctctctattgtgttccattgatctgtgtgtctgcttatatgttagtaccataatgtcttggtacttacagctttgtaatctattttaaagtcaggtagtgtgatgcctccagctttgttctttttgttcaggattgctttagctatgtcgggccttttgtggttccatataaatgttaggattttctttttctatttctttattttgataagaatttggtattttggtattttggtatttggtgttttgataagaattgcattacatctgtggataactttgggtagtatggacattttaacaatatcaattcttctaatctataaatatgtgatatctttccatttacttgtgtcttcctctatttctttcctcagcgttttatagttttcagtgtagagatctatcacttccttagttaagtttattcctagacatcttaatttttggaaactattgtaaatggaattgttttcctgaattctttttcagatagttggcttctagcatacagaaatgctactgatttttttgtatgttgatttagtgtgctgtgacttcactgaattcatttattagttttaacagttttgttgtggaatctttagggttttctatacataaaatcatgtcatttgtaaatgggaatagtttgactttcttgtttccaaattgcatgccttttatttcttcctcttgactagttgctctggcaagcacattcagtattgtgttgtgggtttgtcatatgtggcctttcctgtgttgaggtacataccttttatacttaatttgtggagagtttttatcacgaagggtgttgaatattgccagaagctttttctccatttatttaaatgatcatatggtttttttcctcttactttttgttaatgtggttgtatggtttggatatggtttgtttgtccctaccaaaggtcatgttgaaattggatccccagtgtggcagcactggaaagtggggcctagtggtaggggtgttttggttatgggacagatctctcatgaatgacttggttctattctcagtgagttctcactctctcaggagtggactggttcttgcagaaatggataagttccagtgagagtgggttgtcataatgccaggatgcccctcaggattccctctctttacacacatatgctcttcctttgactttccctgccatgttgtgacgcagcaaaagcccttgcaaaagccaagcatgcttttgaacttctcagcttgcagaactatgagctaaataaaccttttttctttataaattacccagtctctggtattctcttattacaacaccaaataaactaagacagtggtgtgtcacatttgttgatttgcatatgttgaaccattcttgcatctctgggataaattccacttgaacacagtaattgatctttttaatatgctactatattctgtttgctagtttcatgttgagaatttttatgtctatgtttatcaggaatattggactttagttttctttttttgttgtgtccttgtgtggctttggaatcagggtaatgctgcctcataaaattagtttggaagtatttcctagtcttctattttctggaatagtgtgacaagcatcagtattgttctttaaatgtttgatagaattcagcagtgaagccatcaggctgggctttgtattttattttttgatggagggtattttattactgattcaatttcctcactcatcattgatctgtccaaattttcagtttcttcataatttaatcttacaatccttcgtatttctgtgatgtcagttgtagtgtcaccttgttcatctctgacttgaagttttgggatcttatcatattttttcatagactagctaaatgtttgtttattttatctttaaaaaaaccaactcttttgttgttttttttaattttttagtctctgtttatttctgctctgagctttattatttcctttcttctaccaattctggcttagtttcttcttgtttgtctattttcttgaggtgtttggttaagttatttatcaggaatcttccttattttttgatgtaggcatttattgctatgaactttcctcttagaactgtttttgctgtgttccataagttttggtatgatgtgtttccattctcatttgtctcaaggaatttttaaatttccctttcgtctacttacccagttggttactttggagcatgttatttaatttccatgtatttgtaagatttccaaagtttttctcgttgttgatttctaggtttgtaccattatggtctgaaaagatacttgatatgatctctatgttcttaaatttttaagtcttgttttgtagactgcagtatcatttatcctggatgttctattttcagttgagaagaatgtgcattctgtagctgttggatggaatgttttgtaaatacctgttaggttcatttagtctgtagtgtagtttaatatgatgtttctttgttgattttctgtctgtatgatctgttcattgttgacagtggagtgttaaagtccgatactattattgtattgctgtctatctctccctttagaactaataatacgtactttatatatctgagtgctccaagctggctgtgcaaccatggatgggcatgcatatgctggaaagctgcacagtgcctttctccagtaatgtagggctgacttcaagccagctgttgtgctggaaatgggtatgtgcaggccaagaggcctttctgatgtcaaattctttgagttatttttttaaaatgttacaatatgccttggagattatagatatacatacatacatgtatgtgtgtatacatatattatacatttccttcttttttctattgtttgcttttgatgagcatatgcttttcctgtttgcttttgtttggtttggcttaaactttttaaaataggtttttataattggcaattaaaaatatacttttttgctattaatgagtatatatgtctttcgtataaatgcaagcttttttacacaaaagatttctagaagtgagcttgctatgtcagaggatatttgcattttatattttgatagctacactctgacagatagcttcaaaaagaactgtgcttagataacatctgagcttgctcttttcaccacattttcaaaaatagtatcaacctttttcttatattctcaatctaatgagcaaaaagttactgtcttcttattttaatttttattccctctgctagtgagttaacaaacaaacacagcatatgtctcttagttcgtgtatattttctcttgtaaatggtcctttgttcagatttctattagcttgtctttatatttttttgaaagagctctgtataaaatgaatattaaacctttgtatattatagatgttatgactgtttcctcctagttatcttttaactttgttcactgtagctttttccacatggaaattaaaatatatgtatagtaaaatctttcagtcttataaaaattttttctaagtccttttatcattttctttttaaatttgatatctggtgagacagattccaattaattatggcataatttaaaaatttctttgggattcttgcctattttattgttccatataaaccaacaaattatctgtttaaattgattaataatcattaggattttgattgaaattttatctatagatttatatagaatcaatacattaaaatatggactctccccacccaagaacacaatatattgttttatatgttcaaggctttttgaatgtcttatcatacaattttttcatttttaatatagatcttacacatttttggtacctctatgtttatgtgttttaatgtcttattgttctagtcaatatgactttttaagtataattttaatgttttatttttgtcatatagtcaagctgatttttaaaattttatctaacttttatatagtttttcataaacttgtcaattttttatagattttatttattcttgcagagtcgccttttgctgtgattaatcaagccaaccttgattaattaaaccttttaaatttaaaccttttaaaggcttactgtaaattattgctgtgtttattttccacccttattaattatttccttcaactttgttttactttctttgttgtttattaagttgattatttaattattttcaacatttttgctattaattggtacatttttaaggctacttatttttcctttgagtttatctttgcagtagcctattttagtatatattcacagcgactcagtgattttaattttgaattcctcttacagtcaagatttattaaaattgagattttaaatgtatgcaattggagagttttcttgtcgttctttgtttttgcaggaaggaggtgttcatttttactatttatttatttagccagaaagtgtggaccataatttctactgttacaaatgtgtaaaattattttgtggccttatgtagtcaatcttttaaaatattctgtaactattaaaaataagtcatttttgtttgttggatataacttttaatattgaataatctatattgctgtttatttctgactacttcatatcattgatttataatttgtgtccaaatacaacagtgaacttgtttatttctccttataaaattttaataagttgaccttatatttttgatgcatgttgctaagtacctatgatgtattatcttaatattttttaattattttcatcttatactcaagtatatttatgattgataggaccagtcttgatttattagtgaatcttcatgttcgaccattctatgtcattttcatgtaattatgattctagtaaagagaatgtagctaaaattattatgtatatctgacatggcttctatttttaatgaggagttttacttaattcacatttgttgtaatgatcgaaatatttaatcatgtataacctgcttgtttatttttcttcttcttttgtattaagcttattttattagggtattttttcttcattctttctttagtaattctgcattccatttttctcacatcgtgtttgtttaaatacagtatgtaaacttacaatttccaattctatgttgacattaagtatgtcctaaaattgctctttctgaattagattctcagtaatttttcattttctttctacttccctgccccttcctgtgttttgttaaaatgatcatcaacatatatattcagcttatttgttctttaaagccattttcttaggaattatttcctggaaattgccctttaaagtgtcatttagtgggggcgcagtggctcatgcctgtaatcccagcactttgggaggccaaggcgggcggattactggaggtcagaagttcaagaccagcctgaccaacatggtgaaaccctgtctctactaaaaatacaaaaaaattagccaagcattgtgatgcacgcctatagcctagctactcaggaggctaaggcaggagaatcacttgaacccggaaggcagaggttgcagtgagccaagatcgtgccacgaaactctgtctggaaaaaaataaaataaaatgtatcacttagctttattatcaatactttttagacttaaaaacatgcattctggttaaattgttgaccgtctttccttgtatctcacagtgtcatctttttttagatttttttttgtttttcctcaaatatatcctcaaatattttcttcaaaagactcctattagataaagcttcctgagaccctgtgactgaaaatgttacctcagccttcacacattaaagataatttcaatgtaaaattctaggttaaaaattatgttttctcagaattttgaagacatgcttctacagtctctttgcatccacattttctgatgaagataatggtatcaatcagttccttgtttctttgcaaggaattattcactgcactgtccaaaacacagccacctagcacatatgtctcttgaacctttctttgaaatgtgagtagtagactgacgaactgaattttaaaatttcttaaattttaattaatttaaacttaaatgtaaatagccatgtgtagctagtgattagtgcagctctacatcacgaagatacgtatagttggttcattaatctttgtggatatgcagtatgggcattctccatgagttaattcatttttcatacttttcaaccctttgtcatctgtactcttttctaggagaatccctcattttaatcttctattttattattctagtttcaactattctgctgatttattaagtttatggtaattgtgcttttaatttccaaggattctgcccattaattttttatagcagccagttgcttttatcataaatatttatgaaaattttaaaaagtgtataaatatatataaatatatacatgcatgcatgcacacacactgtatgtatattttcatatatatttatacactttaaaaattatatatttttacacttatatacactgaagtgtatatatttttaaatatacactttaaaaaattaaatacatatttccattttatttctgtttcctctatattaactctcattttcttagtggttacctttttgcttgttgagtcagtgactcttttttcatactgtgattctatcaaatgtttagtaattgattatgtcttgatggaaaagtattgatagtgtcatcttatttactcagcacaaatgagaagtaatggtaaatacaggtactagtaacaggagccttcgttctatgtactagacaagggaagagagacacataaagggcccctctataaggataggtcatagcctcttgtattggcacaggagaccataagttatcagaggtacttctcagaattcccattttataaagctgtatttacagcataatcctagaagcaaacattgaggtcagctgctctgaggacagggaattggcatagtatacacacacataccatacacacacatacacacatacacacacacacacaataataaacatactggtccaaccacccatagttttctacttctagccttcactactacttctgatcttgtgcttatttgtggttcatctggaaaaaattacttactttggaggctcttttatctgcatggcttatagatttcagagacctggctaagttttttttttaattggttgcattgagatttagaattggtatatatcgtcctggtggacggacaccttatcactgtgatatgaccttgtttattccaagtaatgctttctgtttgactaatatcaatatagccataccagttttatttggtttgtaactacatggtacacagtaccactctactgttgtacacacatataaattttaaaaattagcttgaaaatattaatcttctacttgaattattttgtttgttaatgtacttattgatgtatttggatttatatccaccttattattatttagcctacctgatcttttttaaatgcctttggtttttctttcttttagattaatcaggtgatttgtcattcaatagtttattatcttattatttttacattttaaacaattcttttaatgcctaagagataaaaatatgtacccatgtcttattacagcttaattcaaatgattgctttcacctcttccacaataaggatacaaccttataacactttaacttcatttatccctttggtattattgtcatgtattttaattttatatatattttaaattccccaaacataaacattgttattttgtgccatatatatacagacatatatatatatatacacacacacacgcgcgtacatacatgcatatacacacacacacacaaacacacatggagaggaaaagaaggtgggagaaagggagggagattgatagagagcctcactatgttgctaagtgggcaactgagcttatctcaaaacttctgggctcaagcaaaccccctgccttagcttcttgaatagctgggattacagttgtgagccatggcacctggcttatattcacttatgtttacccaagtatttatctttgtattgctcttcattttttccttcatttctgcattttcctttatgattgattatgttatttatgaagaagaagttgacttaatatttcctttagtacagtcctaccaagaggaattgttttgatttttgtttttctggaaatattagtatttcatatttatttttgagatatattttcattgagtgtacaatgctagttgacatttatttttagcatttaaaaaatattccaggccaggcgtggtggctcacacctgtaatcctagcactttgggaggccgaggcaggtggattgcctgagctcaggagttcgagaccagcctgggcaacacggtgaaaccccgtctctactaaaatacaaaaaattagctggatgtggtggcatgcacctgtagtcccagctactcgggaggctgaggcaagagaattgcttgaactcaggaactcaggaggtggaggttgcagtgagctgggatcccaccactgcactccagcctgggtgcctgggtgacagagtgagactccatttctaaaaaaaaaaaaaaaaaacaccattctaatttcttctggcttatatcatttctactgagaagtcagctgtaatcttatttctgctccttcaaagatactgtgtattttttccttttgcttcttttatgatttattttacttctgtattttttaaaaatcagtttttctatgatatgccttaatggtttaaaaagtgtttattatgcttttagtttgctgatttttttgaatttatggattgatacttttcttcaatttggaaattttttttgccattatctcttcaaatatagtttctttccaattattttctctctttctgatatacaagttacatatatgtgatgcaatttctctttctctctattcttgcctcctccctttctttttctttctgtgtttccacttgggtcttttctattgactgtctttgagttcattaatcttgtcctcaactctgtccagcttggtactgtatgtatccatttagttcttattttaagacataacactttttatttctagaaatcccatctcattattttgtatagattctatggtggctttatattatgccaactaggttaggctgatctacatttctcacagttctttttcttccatgtttccaattgaagtgggtcatgaaagacatttcatgtgaaattcggaaggtggaattaaagcggtgatcagattaatttacacctggaaagtcatgaacagactcaaatgctgttgcagctcacacatgctgtcattgatctgttggttcacatcattggtgttgagcagcagacaggccttcagctactcctctttcagcttctcggaatcgttagccaaaggtgtgccaactgtatgacaaaggcttttaacttcttgtgcgcaaccattcccactgatggtagaagtagtgagaaactggaaggagcctaggtccatccccatgtgttccagtttattcctgtggattccagtttattctcactgacccaaccttgatatctgttctttttcctcaaatgtttaaccttgagacatgaacctccagtatcagatacaaaggcgtcaaccttaatgtgacttctaaccaactagatagaacatgactggttcagattttaattatctgataaaattctccaacattttatctttttgctgtataatttatctatttttcttattcatgttattcattttttttataatgtttgtcttaatatctacatcatgtgtggatttgtttctgttgcctatttctttttctcttgggttttggacccatggccctgtctcttgccatgcccaaaaggattttaataaatgcagaacactgagaataaagactacagaggctccagatgttgtgatcttgcattagaaaagggttaccctttcttctgccaggcagatagagaggctatcaccttaatttatccaggaataggctgactttagacatgctagaagttttgattaagattcagtctatctttggtttcctttgtctgtagtctggagatctctgtggcttgcaattaagacactacttcattcactagctcattcatcctagcaagtttttgtattctcagcactgggagagtacaaaatgtcccactccaccactcagggtttgtagcttagctctttagctccaccctgcacaccttcaatatttggcaaatattttgaggggaaaatcagttgtgtcttgagcctcttcaattctccaattttttgactccaatccttgtaaatgccaaaatgtctaatggtttctgtgtccccaacggtgcccccttgccatttgaaagcctactttcccagtctacccatgtcaagaatcagcacaatcttccagaaaaaaatgcagctgaagatcattattacacctgtccaatagccttcctttccaatgattttagcctctctaatacttattatctacaactatctattgcatacctttaaacagatgatttttgtgtttgttttgttttaaaaaaatcaacaggtaaatcaatctacttaaaactaatcttcatgcaacaaaaagcctgccaatctgttcttatttatatcaaactgaaatttctattagtttactgctctgctcttaggataaccagttccctagtcttaccatggcttttacaatcatattataatgtcttgtcagtagtaatttgagagggaagataggtgaacatgtcccttcaataagccatcttgaactagaacccccagggcattttgaaccttctgcctgtattacagttatctgattatatttgtctctactgctatgttatacatttcttaaaggtaaagactatatatgttatagttatctgattatatctgtctctactactatgatatacatttcttaaaggtaaagactttatgttattcatattcatgcttaccataatacttagcatatgtaatcatatatagtaggtattcatcatttatttattaaagaacttgtgaatagataactgcatgaagttcagagtcagtggctttcttggtatctttcacatgatgaatagtattgcttttaacaatccaaatattgtgtataatattatagaaatagaggcaaatatttcagttttttttttttttttacagaacgtggtatattctatgcccctaacaaaactcaagcaatattaaaaacaatttgcatctagcttctgggatttttgagagaattctttaaaaatgaaggactttaatcatctggtccctctagattttatagtagttgaagaaatatataaaaaaattttgtgatatatattttggttatctcctaacatttatatttccctttagaaaagaaaaaaatcccacatgaaaagggaaattgaagagaaatattacctaccacataaaaagtcatacttttgtaagattatatttccatttctacataatattctctcattatgaaatcatcagtgcattttttagtcataaacaagacagtgaaaagaaaatgagtaacaatataaatgactttctggaaaatgaggtctattcaaatttcaggaaaaaagttaactctgaagtattaattgatcataatgaggaggccaaacttcagatacacagaggagccatggaacatttcccataggcctgcagcttgtgaagacgtctaggaacactgacatgaagttaaatttaaaagtaaataaaaatagataagactatcagactgtcaacttgaagaacttcaacaaggaatgctatgctctggctttttgcaattcaaatatacagtaggaagaaacataatcccactaaaaaatacaattgccgtcattcttggccactagaaagaaatttcaaaaaggtcagcctctgctcctttcttccctaagaagtgaatcgatgatatagattatctcatgagcccatgaacagatgcccagttgttttggcagaatttcaaccctcgggagagaatcttaatctagtatctttctcactactggtacaagaggcaccaccactttctacaaacttcccaaccctgtttaatcttcacattctggtcttctcctttgacattccacctgaatattacatttttcattaaacaactatatatatgtgtgtgtatatgtatatatatatgtgtatatatgtgtatgtgtgtttgtgtgtgtgtgtgtgtgtgtatatatatatatatatatatatatatatatatatatgaccgttttgcagggactaagacaactcattcagtacagctcctccaaacaccaaatttttattaccaaatgcttcagatggacacctctttaatatgtacctgtcttaaaaatggaagcagactctcaagttccaaacttaagagcaaataccaaaaacaatgacaaactcagtggctgtgcaatacactgaccattcagaaagagaggcttgatctttcttcatcttacattgtcttctgaattcactaccattagattttggaagagcataaatttagaagaatgaagactcaccttccctacttcctttgcctatctctccaggacgacgatagaattttcccttctctctgacacttatcctgactatataatatgcaacactcccagatcttctcaatggactagtgaccacatcacttccattcctagcaccatttatcaaacagtgacctatggaatcaaagtttagcaaaattttttagaacctggcttaagaaaaccaaatcccttgtggttacaacttcaagttgtttcatgcccagagaatgagctacagtcctttccagatattcatgcctgaagctcattaataattttcttctctcagtaagtgaagacgaatcctttaatttgaagtggccttcacactaatgagtcatgtcataactctggaatcctttaagttgattttttatcttgttgactcagtgaggtagaaattaaggacagctcccattagctttatgtatttcttgaagcatctgctcatgatggcaaactgatccatcctaaatatttatttgcctataaatgccatggagtcaacacttcactttcagctactttctttctttcttttctaacccaaacataaaatttctttaaaagttctgtcaataacatcacttgcaatttaaacgctttaaaaatatgatcctttttgctgtgtttttgaatacttccttcatatttaattgctgtagacactttagttcctaattaaactgtattgtttatgatgttcggtctttaatagacatgataacaaaaaaagccagttgtagaaaattctctgattgttaattccagtcttaatcttaatactttccatagccagtgaactcatggggttgagaggagaatgggtagaaaatgagatacaaagcaaatacatagttcatgtttttgaggatttactagatgttctggaagacaagcttgaattagacttgaattgaattgaactctatgatttgtaggggagattagcttagaaatagtatctcaaccacttgcaagataaatatcctcctttgtcaagtctcttttcagcacatccccaggtttcgcgttggtgacagagaggagcatatattgcacacagaaagcttgcttcatcctcagagccctaaaatacttttattgtgagagaatggagacacttgatgaatctgatgggttctggtcatggaaagatttgctatgaaccattgcatcaaggttgaaatgcccaagaggctgacaagcttattgtccatttcaaagattaaatagttttggaaaaattttctcccctggcagttgtaattgtgtccatgaaataagtgttcattctgcttgagccctgtggtttgaatgcttccttctatatttccctccagtggattgattcaaaaaaagatttacttttttagacaatgcaaattaaccctgtgaacctgataacacctcccccaagtcctaacatccttgctgtgtcccatgctaataggcaatcagagacactgtcaagtctctttatcatggattatctttgtatctgtttgaagggagggaaaggaactgagaaatcattcttctaggttaataatgtggttctaggaaatggacaaaagctgccattaataaccttgagagccttgtgctgccagaatagcactcatgagttggtaaagtggccatttagttgtgggacttccaagacacctgaaaaggccttgattgtcccacataaactatagggaggataacgtctccaaaagaagaaagagggtatcagcagaaaaataaaatacaggctcatcataaagcaatcaactgttccctgactttgcccagggtcaacattacatattagtatgctacgtgctgacaaatatttgaccttttgagtgacttacagcatttctgtttctaacctggttaggtaaagatcattatgtgttaacacagaccacaacatattcctacttcacaggtaattatatctagaattcttaagtttatcattttacaatagcctcaatatcatgccttaaaattgaatgtgagaatatcaaagaagcctggggacagttaatggtatttacttctgagcattcactatgtccctggcactgggctaagcctgtgagtaattattttgtgtaatcctgtaacaattctatgaggtaggctctggggctatcctgtagaaactgacactgacactcagagagattgagacgcttgcctaaggtcacacagttagtaattcactgcatcagtttgaacccaggtcttcttcgggatcctggaattggagctcattcataactattgtcctgtactaccttcctgtactatctcaatcctcagtgtcctgagatagaaggataagctaatgctagaaagaagattctttactaaccagacgcatacatagtatgtcgactcttgttggatatgatttttgtgtcattctattattaataagaatagcttctaactgtttttgaaaatgtcgtttgtggctcgaaagcatcttaggatagtgtttgttgcccttgttcaggtactgttctctctccacatttttgggtcttcagaatgatcagcatccatgcctgaagtgaggcaatggtggtccacatatacgagtgagaaaacaacgagcaagaatatctttgttcaggtggctggcaaaatcagctcaccatagttctctagaaactatgagccaaataacaaggcaacattaaggaagctattaatatattgaacatgactgaagccatactagatattagcatcaagcagattcttttctgtgaaaagtagaaatagcagtgggaaacaggacttggaatataagtatgccaatatcatgaacactgacaactagaagcactttttaattaatggaaatgaccattgctgatatcccaagtgatctgtgtgcaggcatcacctgttgaagatgaagatgaaggctgattggtgttttcttacatttccaccagtcagaagtgaataataattgttatatgaatattgtatgctgaaattcatgtgttgaagacaaacctccgcagagccagaggattttctttcaccttcactgcccacaagtctctgtcattcttggctgcacgtgtttccttgcttgatttatctaattattttcttccttctttagtcgaccaagtatttagataccagatggtagggagatcagaagcaggaaccttttctgtctcacatggatgttgtagggattaatgaactaacatattctaaaatgattttaaaaggtgaagtgctatataagtgtcaagcatgattaactagcagccaagttattaggcacctgaatattatgcatcttttctgaatttcagaaaaatggatgtacatattaattttcaacagcactgttatttgaatgatattcatacactcaaataaaagtttagcccaatcccaattatctctacttttctcataccagtcatgtaggccttaaggatggaatatgtatgcaactttgagtaatacagacacaattaccaatcttgtggcgtttttagtgcctcaaggaaaagatacacagtaaaatgcaaaatattacaggaagattgagggacagcaatgagtatgaactgtagctcagaccctctggttccaaactctggtttaaccactagttctgtgactttgggcaaattgttttacctctctttgcattagttatttatgcaaacattggggtggatgatagtacctacttcatagctcatacatataaaatgctcacaaaagcagttcctcacatgcagtgattgctccttaaatattaactattatcattataattgtcactaacactggccttggctggtttcaccctctgagagcgttaataaataagatgtgtagttacttggctaggattcatgtataacttttagtagtttacaaagcccagttacttataatcctaacctatgattattcaacacttgcttgtgccagaatccacaaacctcggtgaaataggttagcaaaatggtagcttttatttttgccttatttgctcagcaaggtttttatttccgttcttctggtaatacactctaaccactaccttttatcccaggtacaggggcggacaaaacttcatacctgattaatcgtagtacttcttaacctaaggcaaacatgtaaaccagcagggctgacctgaggccccctctgacatactaagtaaggatttgatttgaaataaataaaaatagccttgcctaggggttcattatacttgaaaaatgtgagattggggttaaaactgaccacgttcattgccacatgaagaaagtccagctatagtaaaaaagaatgaagccgaacagagctgagctgagctgagagatggaaaagggagagagttctcttagctttgagttttgatcctagcaattgagaccttgatccctatcctttgatttggtcagatagcacagtatcccttccagccatgtgagccaataaatgttttctttttgtttactttaaaatagtttgaactgggtttctgtctcttgaaacttaaaggatccttacaaaacaaatgctataattcacccatttcgtggataagggaattgaggcttagagagattaagtgacttgctcatggtaacataaccagtgatttttcagagccagaacttcataccctatttaatgactccaaatgctatattctagtcaagacaacaaggccagggagctgggagatggagctggtcattaatgaaaggggcagagaagttatagggcaccatcaaattgtggctatcctcgtagctaattcatgcactggttcatcacatatttgttctaaatatgtgatgcacaaagaaaagaaaatctaaggccagttgtttagatagagaaagtgagtgatctgcaggtaccctcaaccctcaagggtggctgtctgctgtcagctgctgttacccagcaaggggtgagaagccacagagccagcctactcgtgtctccaagttgctattccagtgaatgcaatgtatgcagaacatgtcaaactcttgggccgctcagaaaattgattatggagcttgccccttccttaaaaagcaggcttttgtttttattagcatgtgtaaatatggaataacttctaaatgcaaatatggatgacatttgatttttctgacatgtttggaagcagcctggggcaaggtggcagtgaatcagtaaacatcacgggaactacactgggaatgtatcaactgtgcatactattaatgggtttatgccatatgttccataataacatgtttgctaacatgggattggactgcctggttgtatgacaaagctgccacgtcagttttctgatgtatagaaactgagtctgttagccagatatagaaatctagcaaggtcattttaggagtaatttccattttgtgtgcttttttccccctcattgactgtaagagaatgtgatttgcctcattacaatacaattccaggtacaaaatacaataatgacctttatgccaaagactgaagttcatgtaattgataaaatagactcagttctgcagtgttggaaaccattagctggaggcaggaaccgtgttaacttcatgacgtgggaggtcaaaggtcaaggtaaaggcccaggctgcaccacttctggactcagaaagaggaaaacagggctgcccagcaacattggagtttgcggcgctccctaggtgtgtcagagacatcctggggcatgtggaaagtgaaggaaaggcctgttattaaggtgagggtcaaaaagaaactagccaaacacagctgcacagtaacagactggaacaatgggccttatgaagcagggatactgggatagctgtcgctccatttgtcttctctttactgacttcatctgcttcatatctgaccccaaattatactgcccatttggaggcattgcttctttttcctctcctggattcttgattgttggtgctctggtgagaaaccagaaatgtcttatgaaatctttatagctacgtaggaaacttgagcctgccattttcacccacccagggaaggtatttgcctcccgaaaccgtagggtggcctgacatctgctttttattgaaagtagccaaacaaatcacgtccaccatgtggtgattatgacaagtgtattgattgacattttatgaaacatgcatttacaaatggcatctgaataccgaatgccactacggaccttaggactcttcctcaggcagcttggtcggagtgagatattgccagcattcattctccccttcactctgattccactctgattgagagtgcattgtttaatatcccctacgaacgacaacaacccaaacgtaacatagaaatcgggagtgaaaagggactgtgaagagtcacatactatatgaaacttgcagcttataaagagagaattaagaaagaaccagaaatgtatatatttggtcagaaggaaagagaagtgtgaacttaagggtattaagcagaggaaactgcctaaaatgataaataaaatggttagttcagttgtttctttacatccctggagttataagtatctccatctgaccatgagttaatggtattgggtatatttactgttgtatgattttcagagcttctagcccaaaactggagacaaaagctctatgttctaccaatgctcacagatgaataatgctttttttaaaaatatcaccaattctgctgtcatttcagacctcagagactctgcttattaggataggaggcaagcaaagaaatgaggtgggcatagaggtggcaggggttaatttcatatttatcatgagatcttgcatgatttccctaaaagatatttaatttccactgggcataataacttgcagctgccagaatgtgctgtgtaccagtggcgagttcttgtctttggagacttatgcaagtcattatttaaaaatagagatccgggagttacagctggctaattaatctaccactaaggaaagctaagcgagtgacccacttaactgctttcaggaaccatggctactctgaagcaaacttttgaaaaagtcctgtacaaagaaccaaactgatacatcctcatggcactgtcgtggtcttctcagggaacatgttccttctccatctgctcctcattcccacaaacaaacaccactaattcagacccttatccatacacatgtgaacgtccacagtgtgggttcccagatactttgccttttgggtccttctttctgaggttgctgccagtctcttattcttctctttttcctacatcacccgcctgctcaggaaccccgcttcagtccatgttccctattacttccactctgaggcttctgcctgtcttctgaggattcccctaagagactcacaccacatagttacccatatttcttccattccctccactgcacctttccctccaggcagaacaggtctctgccctctcatcctgtccccttacccagaccacctttcccattcctctctcagcctgaatatggtccgtacatcctgcaaagctctactgtatctatcccaggatatttttccttggacttgatagcagatggttgacataatcaaatcatgacacattttcatcattggtctgtgaggaccctaaccttattcttcagtaagtctattgatatatttattatttttcttcctactcctttccccctccctgcagaggcaggcattctattatattttatatacaccttttttattgcacacacccttgtcaaaaaattattgtcatacgtatatgtattttaatttccataaatgacatgtgttaaatttcatctgttttttactttatttacccagtcctatatcttttttcttttttttgagacagagtctcactctgttgcccaggctggagtgcagtgccgtgatcttgactcactgcaacctccacctcctgggttcgagtgatcctcctgcctcagcctcctgagtagctgggactacaggcacccaccaccactgccggctaatttttgtatttttagtagagacagggttttaccatgttggccagactggtctcaaactcctgacttcaagtgatccacccgcctcaacctcccaaagtgctgggataacaggcttgaaccaccatgcctggcccagtcctatacctttaaagtccatccatgtctctaatactccatggtaggcaaccaccacctttaactcttcgctgtcttcataatgtacacatcgagatccctctcaccccctgtaactccccttctctaaaatcccctggccttcatttactataaactagactcttaattatatgctgttttgtattttcctaggaagggtttatgtttctcccttgtctctcatgtaattcctttgagatcagagaccacctcctatactctttcctttcctactccacccaacactacttctgtagatgttctttggagctctgtgcataattgatattcaataaatcattgtttattcagtgaactgaatagtgtaactccatgaaggtaggtatttttctttgttcataaccatatctccagtgtctaaattgtacatggcatgtcataggtgatcaggtaataggcttgaagaaaatgattgtctcacctttcacataagaaagggttatggaataatagattatacaggggtcaggatacctatgttctagtttctagtttgctgccaactagattgtgtgacactgagcacatcaggtatcttctctggatcttggtttgactgaattatttctcatatccttttccaatctaacttgctaagactgattttattaacaatttttcaacatgaaataaaataatcttcaatgtaaaatcatctctagagatagaataatcatactcaaggcagtagggcatgggatacacagggttagggaaagagatgagaaaacatcctatggttccaatctttcgctttcagaatgattggtacaacaaaatgaactactacctgtaaagagcttagaaaagttcctggcacacaataagtcctaaatagtgtctactattatttttataaacttaagaaattctactagcctttatgataatattttacctggcatttggaagttatcacagttataaaccaaacaataccaggaattctagtatcactactgaaattaataggtttctttgatgggacagtaatcacaagacacattctgatttctttaagtataaatatttttttccccaggtaatggacaagttctaattctcatggtttttataaggtgaagtaaaggaatattgtccttcaagatcagttagcagccaagaatgatatttgggccagaatcctgagttctatatttgcaatctattttaaaaaatgactatttctactatagagcagtcacttaaaaatggaaacagaatagagctgtgaatttattaatatcatatgaggatgctatttttccctttggtaaggaagtagtaactaaataacctaatctagtttctcttatcctcagggaagtgaatccaaatattggataaaccattattaaaattctaaacagcatttaaagcatgagcttgtttgttgctataaggctattttttttttctctaggtcgagaggtaaagttatttgtcttaaagaaaaaatcattaaatggtattggtaatgggctgcaggttttataacttaactatatttgcttcacgagcaaaaatagcatttgatggctattttattctactcttcttgggcaaaagaaatcttaatcaaacatcatttcagtttaatgcttttacatgcaaaattcaatttgtgaatttatctgctatctaaatgttaagataaaataagatagaaatacaaaataaggactggagactccatataagctagaaatttttggacaaaggaaggattacaacttctactcaaagggtttgagaaacaggtagataaaatatctagttaccaataacgacctaggaaaatgatcacaattcagttgttttagagctcacaaacactggagtaaattataatacttacatgatgtcttagtctgttctcacactgctatgaagaaatacctgaggctgggtaatttataaaggaaagagatttaattgactcacagttcagcatggctggggaggcctcaagaaacttacaatcatggtggaaggggaagcaaacatatccttcacatggtgtcaagaaggagaagtgcaaagcaaaagctccatataaaaccatcagatctcatgagaactcactcaacatcatgagaacagcatgttggaaacctcccccatgattcaatcatctccacattgtcactcccccaacatgtggtgaccacagttcgtattacaattcaagatgagatttgggtggggacacagagccagaccatatcacatggtgaaatggaaagcaaaaaaaaaaaaaaaaaaaaaagcaggggttgtaatcctagtctctgacaaaactgactttaaaccaacaaagatcaaaaaagacaaagaagagcattacataaaagggaacaattcaacaagaagagctaactattctaaatatatatgcacccaatagaggagcatccagattcataaaacaagttcttggagacctacaaagagacttagactcccacacactaaatagtgggagacttttacaccccactgtcaatattagacagatcaacgagtcagaaaattaacaaggatattcaggactcgaactcagctctggatcaagtggacccaataggtatctacagaactctccacgccaaattaacagactatacgttcttctcagtgccacatggcacttattctaaaatcaaccacataattggaagtaaaacactctgcaacaaatgcaaaaaaactgaaattgtaacaaacagtctctcagaccacagtgcaatcaaattagaactcaagaataagaaactcactcaaaaccacaaaattacatggaaatttgaatgactcctgattaaataaggaaattaagacagagataaataatttctttaaaaccaataaaaacaaagagacaatgtaccagaatctctgcgacatagctaaagcagtgttaagcgggaaatttatagtactaaatgcccatatcagaaagctaaaaagatctcaaattgacaccctaccatcacaattaaaagagctagagaggcaagagcaaactaaccctagcagaaaacaagaagtaactaagatcagagcagaattgaatgagatagagacatgaaaaaccctccaaaaatcaatgaatccaggagctgcttttttgaaaaaatgaacaaaatagaccattagataaactaataaagaggaaaagagagaagaatcaaataaataatgatacaatattgtgtaccatcattttacatttccatataaaagcgttaaacacaataagaaatgataaagaggatgtcaccactgatcccacagaaatgcaaactaccatcagaggatactataaatacctctgtgcaaattaactagaaaatacagtagaaaaggctaaattcctagacacatacaccctcccaagactaaaccaggaggaagtcaaatctctgaatagaccaattacaagttctgaaattggggcagtaattaatagcctaccaaccaaaaaaaagaccatgaccagatggattcacagccgaattctaccagaagtacaaagaggagctggtaccattccttctgaaactatcttaaacaattgaaaaggagggactcctccctaattcattttatgaagccagcatcatcctgataccaagacagggaagaagcacaacaaaaagagaaaatttcaggccaatatccgtgatgaacatcgacacaaaaatcctcaataaaatactggcaaaccgagtccagcagtacatcagaaaatttatctgctatgatcaagtcagcttcatccctgggatgcaagtctggttcaatgtacacaaatcgataaacgtaatccatcacataaacagaaccaaagacaaaaaccacattattatctcaatagatggagaaaaggtatttgataaaattcaacatgacttcatgttaaaaactctcaataaactaggtattgatggaacatatctcaaaataataagagctattcatgacaaacccacagccaatatcatattgaatgggcaaaaactggaagcattccttttgcaaaccagtacaagacaaggatgccctctctcaccactcctattcaacatagtactggaagttctggccagggcaatcaggcaacagaaggaaataaatcatattcaaataggaagagaggaaatcaaattatctctgtttgcagatgacatgattttatatttagaaaaccccatcatatcagccccaaaactctttaaactgataagcaatttcagcagtctgaggatacagaatcaatgtgcaaaaatcacatgcattccttacaccaacagtagacaaccagagtgccaaatcatgaatgaactcccattcacaatcactacaaagagagtacaatacctaggaatatagctaacacggtatgtgaaggacctcatcaaggagaactacaaaacactgctcaaggaaataagagaggacacaaacaaatggaaaaacattccctcctcatgggtaggaagaatcggtatcacaaaaaggccatactgcccaaagtaatttatagattcaatgctattcccattaaattaccattgatgttcttcatcgaatgagaaaatactactttaaatttcatgtggaatcaaagaagaccctacatagccaagacaatttcaagcaaaaagaacaaagctggaggcatcatgctacctgacctcaaactatactacaaggctaccataaccaaaacagcatggtactagaccaaaacagacatatagaccaagggaacagaacagagacctcagaaataacaccacacatctacaaccatctgatctttgacaaacctgacaaaaacaagcaatggggaaatgatctcctattcaataaatggtgctgggaaaactggctagccatatgcagaaaactgaaactggactccttcgttacactttattcaaaaattaactcaagatggattaaagacttaaatgtaaaaccccaaaccataaaaaccttagaagaaaacctaggcaataccattcaggacataggcatgggcaaagacttcatgataaaaatgccaaaagcaatggtaacaaaagccaaaattgacaaatgggatctaattaaactaaagagcttctgcacagcaaaagaaactattgtcagcgtgaacaggcaacctgcaccatgggagaaaatttttgcagtctacccatctgacaaaggtctaatatccagaatttactaggaacttaaatttgcaagaaaaaaaaaccccatcgaaaagtgggcaaaggatatgaacagacacttctcaaaagaagacatttatgcagccaacaaacaggaaaaaaatctccacatcaatgatcatcagagaaatgcaaatcaaaaccacaatgagataccatctcacatctgtcagaatggtgattattaaaaagtcaagaaacaatagatgttggtgaggctgaggagaaataagaatgcttttacactgttggtgggaatgcaaattagttcaaccactgtggaagacagtatggtgattcctcaaggatctagaaccagaaataccatttgacctaacaatcccattactgcgtatgtatccaaaggaatataaattattctgctgtaaagatgcatgcacatatatgtttactgcagcactatttataatagcaaagacatggaaccaacccaaatgtccatcagtgatagactggatagaaaaaatgtggtacatatacactatggaatactatgcagccataaaaaatactgagatcatttcctttgcagggacatggatgaagctggaagccttcatctccagcaaactaacacaggaacagaaaaccaaacaccacacgttctcactcataagtgggagttgaacaatgagaacatatggacacaaagaggggaacaacacacactagggcctgttggggagtggggggtgaggtgagggaacttagaggacggatcaatagggtcagcaaaccatcatgacacactatacctatgtaacaaggctgcatcttctgcacatgtatcccatttttattaaaagaaataaaaacaagcattaaaaatggaaatttgtttttaatcataaatttaattttggggagtaccatagtcttctattaagataaaaatgggctatattctaataatgttattctgtgttgtggggctatattatcacaatagttcttagctgaagctgccgttttttcttatatggtataaattgtgataaaataagcattttgaacacccatggagtgttgccattaattaaagaagataatatttagaaaggcaatttgaaaaatctcaagtcctatacacatttgcttctgttattattttattcaatacaaatcacaaaagtgcctattgtgtaccagaaactgctttaggcacttgaacatttatggagaaataataacactgacctttgcctttaaggatttcataatgttggggaaaccaatatgtaaacagagaatgccaatgtaatgtggtaagtgtgatgatagatacatgccaaggtgcttgggagcatagaaagggacccctaagtaagtttttagagtcagagagttcagaggaggttagagaaaatacaggaagggagtttcagaggaggaggtggcaagaatgtagccttcaggtgaaaaatagcatagtatattctgagcagtaaagagatcagcattcctagagcttaaaatattgagcagagaaagcagaagatgagtctctagaagtcggattacagaaggtctgtctattatgttaaaggttcagatttatctgcttggtgatgaaaagtaaggaaacaatggggtccctccgggggagtatggaacgtggatccaagggtcagagagaacagtgaagagggtattgctgaagtctaggggaaagagccttcagttattcatgtttccatgctgtttcttagaggctcagcccaagtatctgatctttcccgcatctatgcataagttttctcaagcagtgctggtgatctccacaccgcatcttcctcctaaaatatttactgattatctgcattcaagtatgttataaactattttaatttgagatataaatattagtcatgcagctaactgcacccacctttccaggagcatctgctttttgtgacagacactgtggctttcaagggccttgccttattacttattacttattgcaccccactattcaacctgtcttcctactgcactaatatgcaccctgtgctgcagtcatgcagaagtcttcactgttctagaaaatgaagcacatgctgtgtgtatcacatggctggagtaatcatttggacagtgaagattttctgaggtgtccccatcatctcgtcacacctgttgcagaatgccacaggcagctctgtgaggcacgtgctgctgcttctgaaatgatgcattcccactcaattacctcattcattacaagttttcagctacagattaggagtactattcaccccttctgtcttagcagaatgttaggaacatttgaatcagtggtactttttaaaaaaaattagattttactgctgtttgctgtttactattacaatcacagaagtaaaggctaagccattttcttctttaaaaaatagtgttttccaatatgttcaaacaatctccaaatgaatagaagaaaaaaatgcccacagaagtttcttagactcactgtcatatctggatactttaatctcagatgttctggctcttcccaggctgataggatggctgggctaataatacaaataccttaagggctctgttctctactgagtctggacctagaatgtgcagctttaggattaggggtactagttttagagtcaaactgattcccttcctgattaccacttacaaactgtgagatgtctttagggtggttggagggattaaatgtgatcatctgcactgctagtatatagtaagggctcaaaaaatgaagcctgctatggaattatgactattaataattcatgctctaatttaagaaattgcctggtttaactagcctcaggcagaggctgggactgctttctcatcaggcctcagctacatggctacaatatagagaggttccttttcagatatgcacacacacttgcttctctcatcactgatgatgcttgctctctctagtcaattaatatgatccacctctcagggtaatcatttccctaaggaccaaatgtgcttacattcagttgcacccattgtaatgcaattaatttttccaataatatccatctaatagataggtacattataaaggagagccataataataagctacctcctgtttgctcattttgaagagactcattacggacaatggtcctcaatgttaatgaagtgacacaatccaattagaagattgcagttacacatggtagtggtagaatgagaggaattgctacctaacaggtaatgtcactgtttgtgccttgtttttgccctctgtggggttgtttctgctttggtccagatctcactctgtccttgggcctactttgggattctgccatcttctgaatgctggtaaatgcctaagctgtaaacagcttgcttttctgcagaacagctcatgcctgaaaaagttgataatgatttcaaaatttcttttaattgagtttttaattacaacacagatagcaaatagccctatcacatgtaattttgacaaagataacaagcaatttcatattctttggagaatgacagtgtgggagcctacagttaagtaccgactgccttgtttttagacaggaatatctgacaaccactcactcagggaaggtcgggaactggaacatctggatctcaataaattgttcaatataacaatccaagtgctataacacaagctgctactgggaatgtaaatctgactggctggtttaggatcttgtctttctaattaatagaccacgtattatgaattgggatactgtagagccagttggtgtatgggcatgccttcaccttaaataaatatttttatcttcagatcttatcacatcagaaaaaaatatgcagataaattattccaaaatgcaaagcttaaatttgatatgggtgccgtgtttcttcattacttttcttttattggcatttacttaagagttctagagccatgcccagagttccagaactccagagctaaaattagacaaagaaacttctccatctcagagagcagagaactcgcccacattagctgatctactggcacctcccacagactcacaaaggccatttgcataactcccatgcctcctagtaacatccaaaggctcaagccgatgtatctttttcaaccacagagcagtaattatcagacttttgcatttcaaaaacctggaaaacaaaaattcttcttaattcaagtcctacagagtggtcaacttcttattttgctaagtaaagatcattaatttttttccttttcactcatttgttaattcagtgaatatttattgagcacatactatctgcagctactaaagtatgtctgggaatgcgatgaaaatcaaagctagatatagcccatgacctcaagcatcatatagtctagtgggggagatagtcatcattaattaattacatttatatatatatatatatatatgaaatttaaattgagctacgtactctacaggaaatagacatggttctctgcaagcatgtaatatcatatattaattttatatggaaagagagtatcagggaaatattccccttaaaattaatgcttccactgaacaaatctcagactatgcaggccatggtaaggattttgagcttcatgttaagagtaataaaaagtaactaaggaattttaagcaggattgatgtttttaaagaattcctctggatgctattggggaatggattggaagaaaagcaagagtggaaggagtgagatcaattgaaatgacatttcagtggcctagatatgacctgtgtgatggccatggtgcaagtaactagttggatttaaaacatatcttgaaactagaatttttgagactctgacaaatgaagagagaagagagaaagagagaagtatcaaggatgattctcatattcctggcaagagcaacttgccatttaatacaccatttactgagctctaaagaccaagaaaggagcaggttaggggaggaagggggaatcagaggttccttttggggcttgttaaatttaaggtgcctatgaaatatccaaggcaggaagatacaggtgtcagaagattagaggaggattctgacgctagatatacatttaggagttatcagcgtatcgatggtatttaaagctatgggagtcaataacatttcacaggaataagcatgatggaagttataatatttttgaggcctgatacagaaggagaaatcttcagagcatctttccatgaaagggatcacattttaacacccacaaagtagaaagaacataatatcaattctttaatttaaggacatttagctgcatgaaatcctctctccattgtccttatctttctcattttgctgcagatcagtgagaactttgttataaaacagcagtggcaaaccactaccgtagcgtttctgcaactgccttaggcaggaattacctcattttggtagcagaaagtcttgtccacatccagcctcgcctcacctcttagattttccaagcttaaaacacatctggagattctgaatcaatttaggacggactaaaagtcacaaagtagcacagatcctacattatgacatccgttctgtcctatcctacattgcaaaatctgtgtctatgcattttgtagcattcctaagtcaggggactacattgcaaattgtaatattgttagtcatatatagggtcaaaaacacacttgcataaatatcgcctcttcctgccaatcacagtactgtcattcgtcgtagtattctttcctactgaacctaatataagtttccagatcctcctgttacagtgtccaagacagtcctaatcaaccaggttgaatatgggaggtaatagtaataataaaaataattatattatacttatagctgttataattaataacattttttgtactttgtctcatgcactgcactaagtgttgtctatgcctcaccttatgtaaacattaactgcaacttagaagattgctaagagatgaagaaacttttttttttttttttgagacggagtttcactcttgttgcccaggctggagtgcaatggcgcactctcagctcaccacagcctccgcctctcaggttcaagtgattctcctgcctcagcctcccgagtagctgggattacaggcatgcccccccacatccagctaatttttttgtatttttagtagagacagggtttctccatgttggtcaggctggtcgcaaactcctgacctcaggtgatccacccgcctcagccttccaaagtgctgggatcactggcgtgagccaccgcacttggcagaagaaacgttttacagatgaaaaaactgaggttgaacaatgagcatcccaggtgtacatttcattattgtttctacattgtgttgtaattatatgaaaagtacagattgagactctgtactttccaatttggaatcttaacacctaacagtgcttggcacatttaaggcacgtattaaatgttgaattatggaaggccttacatacgctatagtgatagaagcttttcaaatggaagtggttatgtcctgcgtgatttggaccctcttacagcacctagcataatactcaataagtatttggaaggttgagtatatggatttaaaattggctggaaaaattccagtaaactcagaggttttggagtgatggtgctagtagtgggatcactactgaagaaggataaagaagatgaacctcctaatatgctcttgccacaactgtgggtctgactcttatttaagcattcttattcatgacctggatggaaaaaaaaggaagaagctgctcctttttagaattcactaatgattctaatttggaaagtatcttgagcagctcgggcaacagaaataaaatgcaaatgacctttgagacatgaggtatgtaggctgggaataataactttgtgagcatttgaaaaaggcaaggcagtgaatacacctggggaaagagaatccaaacacagagctgttctgggaagcagatgccagatctcagtgatgccaaagtaggcccaggaggcacagtggttggcaaattaaattcaggccagccatgcagtctggcaggatgaaagagaagtccaggttgaggctgcctgtgcagaagggcacggaataacagttcctctgtggacagttgtagctgagcagcacctggcaccacacgttgtgttcccaccacttcattactagggaagctcaggcaatttggaagtgcagagaatagcaataagagtgaatgaattcaagagcccgaggaaggatgcggatgaaagattaaaaggattggatagctgtagtttagctacagaaagctaagggaagagaaaggagaggcctggaaactaataataaatatccaagtctgttctaaaatagccaagaagaaacttgcagagtaaccattaaattaagatttttcaattgaaaatggacattttcttccaagccataggcttcttgcctaaaccagcactctgcctacgcaggtgcttagtaaatactatcttatggaataacttttgtttgccaaaagagtatatgatctgggaactagaccaaccgaaaacacattaaaaaatcagacaacccattccttagcgccccgtgaggacaggattaaaggaactggatttttgttgtgttgttcaagtcatactcttcaacaatgaagttacctcttcccattcagacaaataaagaacaaaatagaaacctttgtagcacagggaatgcctaagacacggttgactaggctctggttaaatcccagtattgcaatttactttatgtcaaagggaacaagcaaaatgctaatgcctaccctctcagacaaaccttcctaggcaatggagggggtgtagaaaagggtgtactttctggactaatggtgtacttggtggacttcacttttaaatgatcaaccacttgggaggcggaggggagtggatcacaaggtcaggaatttgagaccagcctggccaacatagtgaaaccccatctctactaaaaatacaaaaaagtagctgggtgcggtggcaggtgcctgtactctcagctacttgggaggctgaggcaggagaatcacttgaacctgggaggaggcagaggttgcagtgagccaggatcgcgccactgcactgcactccagccccagcgacaatgcgagattctgtctcaaaaaaaaaaaaaaaaaaatcaaccacaaatatccaagtagataagttagaggtaatttcttgttttatagaaggagtctctataaacagccagctccccttgctttgagccattctttgtttacagatcattaaccacacctttcttaacttagtgcctgggtaagaaaataaagtattcagcttcccagccaattgcaaagccttcatagtgccattgttaagctccaggctcagagggcttcctcaaacaagccagacctttgaaacatactgctcctccctctgctggtcttgtttatcctcccacttctctgccccattcttgctttcttcctggctggctccctctcattcttttcctctcaacttaaatgtcccctcttctaaaaggccaccctatgtgtgtttatctgcttgggatgattttggctgcaaataagaggaaactgtatcgatagtggcccaggccagtagatattaattcacttgcttgaagtccataagcacatagttcagctctggtaccatggctcagcaatgcagtcaaggaccaggcagccttctagctctctgcttcatctcataccattggcttccatctttattatttcaatatatatgcttcaccccagcatcacttccatgccccaggcaggatgacatagcaggagttaagggagcataaagtctttcttacgtgaggcgttgttgcttttttcaggaaggagaatagtccccagagactcctaactatctctgattgattagaactgtgtcacgtgcaagatagtctgaaatatcatgattagctttccaacctctatagtaaaggaaggcaagggccaggggtctgtggatatcttttaggcagccaaacttcagtgtctgccatggtatatgcctctccctctcctaccccccatttaccctcagtcatggttccatatttttttctcttcatggcatttaccatgatttgtagttgtacattttaatcccactgggatagatatcttccatagctggctctgccgccactgtatccccagcctttagtgccctgtgcctgatgaatagcaggtacttaataaacatggtttgatttgtagcttagctggctgctagatgaaaagagaagagaagttatttctgaagttatcacacaatcacaacatcctggaaaaacaggattctggttatcaaaatttgatttacacatacatcctttgtatttattataccatgtttcaaatataaagagatgtatatatgaaataaaataacgaacactcaaattcccaccattcagctctatcaaatttacagattttgccataggcccttgaggtctgttgatactgttatattttaagaaacaaaacatctcaaatccaattgatgtccccgtgtcccttccctgtccgtgctcctgtctttctgtctccagaaataaccattaccctgaatttgagtttaccagtctagtatgcatttttatactatgactatatatgtacatagtcatagcaattacagggcattattttgcaggttttcaagctgttatataaatattatattttgtataaaattatatagattatataaatactaaaaatattattacctttttggtctatttgtttaactacatttttgcatatagctatgtagtgttttgttgtataaatataccacaatttatttttccatttttctgttgataaacattttgattgtttacagtcttcccctgtaataggtaatgccacatacaattaacattcttttacatatttttttttgtcacacatgtgagggtttcttagtctaagatatatacctagaagtaaatttacagggggaaggaggtaggattgctctgattttctttgattcggccaaagtgttctacaaaacagttgtgccaactgatgcttccacaagcagtggatgagagaagctgtttcaggtttcagcagttggtatcatcagacagatctgtatcaatcttttagtgtgaaatggcatcacatcattttattttgtgtttccctgacaatgaggaaggtcgaagatctttaaataggtatcttggccaatcaagttttgttttataaaaatttgtgtccatttcccttttagagggaatgggttttgttttcttattgatttatacagtactttatatattctggatagcaattctttgttgttaacatgcattgcaaatgtctttttccacactgttgctaggcttttcatgttgtttatgatgttgctttattaatagcagtattcaattttaatatcatacaatttatcaacctattactttgtggtttgggctttttatgtctcatataagaaaaccttcttcatttccaaaattctaaagattctaccatatttacttataaaagctttacagtttggctttctacaagtagtccagctggaatcattgttatataatataatgggctctaattttattttattttttgctgcataggtaactagtcatctcagcagcattattgaatgcttcattttttggtcactgattgattgataccaagtttgcatgtatgtgtgtgtctctttttggattctgtattatgcttcagtgttctatttttttccccatgacagtactactccttgattattcctgtagctttagagatattattgcatagggttaggtgtaggggcttagtagccatgctgcttgagtttgaatcctaacaatgccactgcctagccatgggatcttgaaagagttccataatctctttgtgtaccagtttcttttttatctgtaaaatggtgacaataatcatatctaacttataatggataaaaagcttttgcctgttttttgttttgttttgttttttgagacggagttttgctcttgtcacccaggctggaatgcaatggagcgatctcagttcggttcactgcaacctctgcctcccgggttcaagcgattttcctgtcacagcctcccgagtagctgggattacagcacctgccaccacacccagctaatttaatttttgtagttttagtaaagacagggtttcaccacgtttgccagtctggtcttgaactcctgatctcaggtgatctgcacccccgccctgcctgcaccggcttgccaaagtgctaggattacaggtgtgagccactgtgcctggccttgcctggtattttaataaaccttaaaagttagcagttttagtcatagtgtgagtatcagcattattattactaattgtgatatctgataggtcaggtcacttctaccctttcttcttctccaaaatggtcttaaacattgttgaccttttgctctttcacatgaatttcaagatcagcttatagtgcttcatgacaaagttgattgaaaacacaaatgtcattgcattgacatatggattaatttgattctccttatccgtaaacttgacataactttgtttattcagctcttttatgccaattagaaagtaattttgtaatttattccacagaggcccacacatgtttcttagaattatttttagctgcattgcagtttgttgttgctattgtgaataagatttttttcatcttattaattattattattacagcttggattctggtgtcaatgccatgttcttttttattgatacataatatttgcacatatttattcagtccatgtgatattttgttgcattcatagcatgtgcaattattaagtcaaggtatttggagtatccatcacctagaatttttactatttctgtgtgttggtaacatttcaagtcctttcttctaggtgttttgaaatttacgatacatttttgtaaactatagtcatcatactctgctgtcatatattagagcttatttcttctatttcactgtatgcttgtattcattaaccaacctctcttcatacccctcccaacccccaccacacacacacttcacagcctctggtaactatcattccactctgtacctccatgaggtcaacattttcagttgcatgtcagctccactgttgggggcagtggggtcactgccaatggttcatgctttggccctggtgacagcagccaggagcagcagctgctgcaggtgggggaggtcaatgggtttccaagggtgtggatatgcagagactgttgcaccctagggcaagatgcagtgtagcggaggctgggctctaaaaatggcaccttgctgtagctagttaggacttggggtatgtgtgggacccaatgtgagctccctctctggagcaatgctgtcatgtggattccaggcagctccctatgttagtctcagggcccacaaagatcaagggactctctcacggctaggattgctggagtctgtggtgggaatgtggaccactgagggtctctcacttaccctttcccccacattggagagcttttgcaggctctgagctgctccctactgaattggatgcctcacttccctcttcctttgctttcctttcacttttctgctgaattccagtgtcctctcttagatgacttacttgaagtgtgattatctgttcactcttttggctcctctttgtggaggaggtgagtaccagatacctctagtcagccatcttgaagcccctcagcgttattattcttgaatgagttgttactgctctgtagaaattctgttgttacctttatgttgatcatgtatctggccaccttgctgaacactgactaatgtttatggtctgcagattcccatgaattatttatgtaaacaaaccatttatgctttaatatagctttgtttctgtctttctaatatgtgcctcatatttatttttatttttcttttcttaaaatgttgactaagaactcctaacagcattaaagaggagtattgatagcaggcatccttatcttattctaaccctaatggtaactttatgttgcattattaggtttgattcttgctatcggtttttggtagataatatttatcaagtttagaaagttaccttttatttctagtttacaaagatttttagacataaaagaatgttaaatttcatgaaatattttttggagtctcttgagtttatcatggattatctatttttaatttgttattattgggtagtactttaatagattttctaatgttgaaacatctttttatcctaggataataatacacattggtaatcaatagtgtttcaaagaaatacttgggtcttttcccaaaggacaaaaaacctgaaggtttcaagcaattactttgatttgattttacataagttgtttttagatctttgtaggtaccattcctttatctctgtcatcttttggcatttatttattttttaatatggagcatgtaaaacgtgtataatagtaacaaaagatatgaacagtgggagatgaggaaggtggaaatgttagctctacttattttggaccacaaaatgagggttgctagaatctcctctgaagtactggatttgaaaatcgatcagccaagaatttctggagtcactcaggcccgtgccatataattacattatttgctgaggaggttaatcaggctggccatttgtctaaagacctggtgacacctatatccaaaattattttcaaaacgagcccttaactgccccgcataactgggtcctgcttgtgagctgcaagggcttgacttcttaggagttgtcctgtgtggcactgatgatacctggtgatggaaaatgtgtctgctcttattcccttacagccactttgttttctctctatttttactcgtctttagtaattacatgatttttgagactaacatacatgtaaaaccttttgtagatctgatgctaagcaaagaaacgatgttctgctcaataagtagagtttccatcttacaaaattatttcagtgcaattgcttttggtggtaaaatgccaagcattgtagaaatatgattttgatggtggttgagcagtactgtttctgtctaattacactcacgtattcatacaattactgtgaaattactgtaccaaaagcagtatatacacatagtaataataatgcaatgttctgattggctggctttttaaaagatttcagaaattgattaaaacatttaatggttcttctttcaagtatttgtgaaccaaatttcttattccaattgaaaatatgttacaaagagaatattcatttctccttcccccttcatcatgtagaacatagggagaaagatacggaactcctgggagttatctccttgattaactatgaagtaataaacagaagaaaacagcaacaattcatgtagttgggtactaaatctacacctttatggcctgcatttgccaactgtctccatatttgacagataaagtgcatctgtgaattttaagtctctcgggttatagttaagatatgtaattagagttccagatatacatcttacctaaaaacttctgctatggggaggggagaaaccaattaagtcagttttactcagcttcaaaaaaaacccctcaacctgaaaactgatgaaataactaatgaggacacttcatgtggggcatgttatttcttgatagagcaagtgtgttctgggacagaggctcttctttccctgaaggctggagtcaggaggtttacttggttaataaaaccacctccttgagacatgtgacttgatgtgtgtgtggtggagggggtagaaactagtatttttgaacatttgttatatatagtttcctaagcatttatacttatcagaagaaagttagctatctgagaaactctattaacttaaacaggccaatgaagagctgcttcaatgcactgaagcacaaatgcattacaatccctgggctgctgaggactaattccagactagaaacacttctaataattctaatgactataatgacaaaaagtaactaatatttcctgagcagatagtacatgcaagacttactaaatgttaagtaagtgttaacttatttaatattcaagaaaaacacatggtaggtaataggtcattaatagttagaaactgaggttcaaaacagttaactaatttgcccaaggtactataaatatctcctttgataggttaaatcatttttcttctgtaaaatggaaacagaccagttgattattgccatttataaaatagccttaatgcccttaaaaataaaaactcccttgaataatatatgaggagaaggcaggaagatgctagaaatgtcagcttattagagtaagtatgtattatattgttaacagccaccaaaaattcacatagaaagaagttactagagatcttcaggaagattacaatctaatcagacagataaaacacacacacaagaaattacttgaaataattaaataataaaatgtcaacaaatgcaaagtagatacataattggaattgaattctagtttctgtggaattaatatcattaaatcagatacaaaatgatggggcagggagagagtgggtgactccttctcttaaaggattcttcctgctttcaacataagctggtgattccaatgagtgcatgaggacaaatcaatgtgaagggcccaggaaatgctgactgatccaaacaaagtgaacctggtcattaatgttctcctaaaggtgagatttgagattcaaagaaggtgagacccattgatcagttcagaggagccaagggatattctgatttgaggataaggtggagagagcagattaggctattgatagactgaagaacgagtgaaaaagtagcaggtgtaaaggagggaggcaggagtgagagatgcaataaatttttctaaagtagctgggtcaggaaaatttgaagagctagataaagattacagtagaattcccagggttctatatttttagagggattctgggtaccaggaaaattcaataagaaattctggggttaggacataatttttataaaagatttattaaatatattattcatataccatacaactcacccatttaaggcatatgatactgtgttttttagtgtattcagagttgtgcaaccatcactgcaaccaattttagaacatttttatcacttcaaaagggaactatacccattagcagtctactcccccgtcctcctaataaccctagctgtaagcagccactaatctgctgtctctatagatttgcctattccggatactccatacaaatggaatcatacagtacgtggccttttgtgtccagcttctttcattaagcataatattttccagtttcatccatgccatagtatgtatctgtacttcatgatttttatggctgaataatattttattctatggacatatacacatacattttattaattaatttatcagttcatggacatttgggttgtcactttttggccattatgaataatgctgctatcaacattcatgtacaagttttggtgtgaaaataagtttttttcttttttggataaatacctgcctgtgagtggaattgctggtgcttatactaactctatgttcaacattttcaggaactaccagactattttttagagtagctgtaccagtttacatttctaccaacagtttatgagggttctgatttctccatatcttagccaactcttgttattatctatcattctgatagtagccatgataatgggtatacctcattatggctttggttgcatttcctagttggctaataatgttgagcatcttttcctgtacttactgactatatatcttctttggataaatgtttcttcaaatcgtttgaccatttttaattgggctatttatctttttcttattgagctttaaaaattctttatatattctacatgcacatccttaattatatgtatgatgtgcaaatattttctctcaccttgtgggctatcttttcactttcttgccagtgtgctttgaacacaaatgtttttaattttgataaatccaatttatctgtttttttcttttgtcacttatgcttttagtgtcgtatttaaaaaggcttgcctaatccaaagtaaggagtatttactcctacattttcttttgagagtagtagaattttagctcttatgcttaggtctattatctattttgagtttaattttgtgaatggtgtgaggaaggtgtctaacttcactttttttgcatgtgaatatacagttatcaccgaaccagatgttgaaaaaattaccccctccccgaccctcaccattggattgtcttagcactctcataaaaaattgatcatagatatatattcttattttgggactcttaagtttattccattgatcttcatgtatttccttcttccactgcgtgcagttttgattaccataactttgtggcaaattttgaaatcagaaagtgtgaatcctccaacttttttatcctttcataggattgcttctggctatgctgggtcccttgaatttccgtgtgaattttaggattaactcatcaatgggaaattgggatgcgggcttctccaaactctccaggcaaaactaatgttccatcaggattgtaaaccacaggtaaagatctgagaggaggcaaataacatttactgattacctaccatgcatctaaattctgcagtggtgaatttatatgtcttattgtttaatccccatggtagccttatggagcaaatactccaattttcaggtaataaatatgagtctaagaaaggttgtcttgccatagtttataaatagtgatgtcaagatttatcttaggtttccacattagttattctacctctctccccaaagaaaagtagagtagataggctggaaactaacccttccactcctatgaatagcctttgcatcccattagggatgcaatgtaacatttatgttgtattagactttatacatatatttcttccatttgtagaatgggaatgtgtggagtcattccagccaaaagcagaagaacaaaagaaaatgaatcatacattttcaatatggctacatcataaagttatataagaggaagaatacaaaagatgaaacatgttagtaagagggagctatggtggttcccaaatgacaaactatgataaatatttccccaaaaacaaaactacaatgagacaccccctcacaaaagtcagaatggctattactacaaaaacaaaaagtagccaacattggagaagttgtggagaaaagggaacacttatacactgttagaaggaatgtaaattagttcagccactgtggaaagcagtttggagatttctgaaagaatttttaaaacagaactacctttcaactcagcaatcctattactgggtatatacccaaaggaaaataaattgttctaccaaatgacacctgcactcatacgttcatcacagcactattcacaatagcaaagacagggaattaacctagatgcctatcaacagtgggctggataaagaaaatgtacatatacaccatggaatactaagcagccataaaaaataatgaaatattgccctttgcagcaacatggatgcagctggagcccataatcctaatcaatttaactcaggaacagaaaatcaaatgccacatgttctcacttataagtgggagctaaacattgagtacacatggacatgtagaagagatcaatagacactgggcactggggacccctagagtagggagaatgggaggggaggaagggctgaaaaactacctactgggtactatgctaactacctgaataacaggattatttgtacaccaaagtttagtgctgcaatttacccatgtaacaaacctgcacatgtacccgtaaacctaaaataaaagttgaaaataaagtaaaatggcataaaatgttatagatacatttatctatgccaatgttttgaatttgatattttactatagttacacaggtatagctcttggggaaaattgggtaaagagtatgtgggaccattctgtattatattttcaacttcctataaatacacaactatttaataataaatttttaaaaaagaaaaaagaggaggcaatgtgctgagttttcagtaaagctaaaattacttaaatacttctgaaattattttccttcctggtgtgtgactatatatgaaaaatatcttattaaataatagagaaaatgcatagataatatatctttttcctttttctctctttacttggagtaataaaaagtttgtaacccttggtaagtcttccaaaattgttaattttactttgctggttcaagaaggccaaatctagaaaccactaccatagatgacgggaagctactgaagaattttgaatattaagtggaatgaatctttagacttatgtgtaagacaaatcacccttccaacaaacgacgttaggacaactgcacatgcaaatgcaaaagaatgaagttgaacccatacctcacacaaccctccaaaattaacaaagtaaattatagacttaaatggaggatataaaactcctgcaggaaaacagaagagtaaatttccatgatcatggagtaggcaattactttttacatttgaaatcagaagcataagcaacaacaataaagaacaatagatacgttaaactttgtcaaaattaaaaacctttgtccttcaaagggtaccatcaagaaaatgaaaaatcaggacttggggtggagcaaggtggagtaggagtctccactgatcatccctcacacaaggagattaatttaacaactatgtacacagaataaaacaccttcataagaaccaaaactcaggtgagcattcacagtacacagtacgtggttttaacttcatatcaatgcaagaggcactgaagaggcaggaaaaacagccttgaattgctgatgccgcctctctcccatgccccagaggtgacagcatggtggagaatgctactgtgtgctggcaagagggaaatcacagcaactgtgacacatttaataatgtctcagggcatttaataatcaaactcccaaaggtcaaggatagcataaagatcatcctaaaagcagcaagggaaaagaagcaaatgacatacaatggagctccaataaagcatagagaacccagaaacaaatccatgcacctaaagtgaactcatttttgacagaggagaaccaagatcatgcactggggaaaagaccatctcttcaataaatgatgctgggaaaactagatatccatatgcagaagaataaaactagaccccctatctctcaccatatacaaaaatcaaatcaaaatggatttaagacttaagtctgagacctcaaactataaaaccactacaggaaacattggagaaactcttcaggacgttgatttgggcgaaattttattgagataccccaaaagtagaggccaccaaagcaaaaatggacaaatgggatcacctcaagttaaaaagctctgcacagcaaaagaaataattaatgaagtgaagcgacaacccacagaatgggagaaaatacttgcaaactacccatctgacaagagattaacaaccagaatatataaggagctgaaacaactccataggaaaaaatctaataatccaattaaaaaatgagcaaaatatttgaatagatatttctcaaaggaagacatacaaatggcaaacaggcatatgaagtagtgctcaacatcgctgatcatcagaaaagtgaaaatcaaaactacaatgagatatcatctcaccccacttaaaatggcttgtatccaaaagacaggcaattgcaaacactggtgaagatgtggaggaaaggaaacccttgcacactgttggtgggaatgtaaattagtacaatcactgtggagaacagtttgaacgttccttgaaaaactaaatatagagttactgtatgatccagcaatcccaccgctgggtatataaccaaaagaaaggaaatcagtaaatcaaagagatatctgcattcccatgtttgttgcagcaagaacttggaagccaaaatttggaagccaaaacttggaagcaacctaagtgtccatcaatagatgaatggataaagaaaatctggtacttatacacaacagaatactgtttagccatttaaaaacatgagatcctgtcatttgcagcaacacggatggaactggaggtcattatgctaagtaaaataactcaagcacagaaagacaaatattgcctgttctctcactcatttgtgggatctagaaaccaaaggaatagaattcatggagatagagagtagaacgatggttaccagaggctaggaaggatagtgggagggttgtggggaagtggggatgtttaacgggtacagaataaatagaaagaatgaataagaaatggtgtttgatagcccaatagggtacaatagtcagtaatagtttagttgtgaatgttttaaaaagacaatgaaaaatctactcacagaatgggagaatatatttgcaaattatatatcagataaaggactcacatctagaatatataaataattattacaatgtaatttaaaaatttgtctaatgattttagtagccatctcccgaaagaagatatataaatggccaataaatacatgaaaagatgctcaacaccattagaaatctgaaaaatgcaaatcaaaccacaatgagataccacttcacaccggcttgatggctactgtcaaaatgatagataataaaaatgattggcaaagatggagaaactggaatcctcatacactgctgatagggaatcaaaatggcacagcagttttgaaacatagtctagcggttccttaaaatgttggacatagaggccacacatgattcagtaatttcactctgagaaaaataaaaacacatccacacaaaaacttttacatgcattttcaaagcagcattatttttacagtcaaagagtggaaggaacctacatgtctgtcaactgattaatggattgaaaaatgtatgaggtccatacaatctaatattattcagcaattaaaaatacagatacatggtacaacatgtatgaatcttggaaacattctaagtgaagcaagctagtcacaaaagaccaaatattatataattctatttatatgaaatgtccagaataggcacatctatggagatagtagtttagttgtttcctggggctgggacaagggagtaggagcaggaataagaaatgaccataaatggggacagtgtttctccttgggctgatgaaaatgttctaaaattagattgtggtgataaatgcacaatgcagtgaatataacaaaatgcactgaactcactttaaatgagtgaattatatggtatgtgagttttatcaaaataaaactcttaaaaaagtcgggggaggatcactaagtgtcacagtggaggacaggatgtaagaagctgagatgatagacaaggatataagcaaagaccatgtttacatagttcaggaaaattaaaagcagggcttgaactaccatagtggcaatgggaatgatatagtgggaacaaatgcaggatgatgtggtggtaactaggcacactttctctctacatcatcaacacccacttgatagccactttcacccacttgagcgctactgtctctgatgggtagaaacctcactttatttgaaaacacccagagccaaacgtctgtccaccatctcctgagttggcctgcctatgtggagaatcatttaaattatttttactatttgaggcaaaatgtgcttgtctgcaacatctacccattgtctttcattgtgccttgtaaaagtaaatatattactatgataatgtttgaaaacgtttgtttaatagatgatccagatctgctggagattatagactgtatcaatatttgtacaataaaggtcagagagacaattctcaagttagaatttttgaaaatctaaactgttcatcagataggtagatgaagagaccaagccctcatgtggtgtcagaccagctttctcatcccaaatattaatacattttggttgcacatagaaggaaggcataggaaccccattgctatgtggggcttttactgatggcatctttctggaatcctgagaaggtactatccacactcctgtcattcagtttaattgaaatgtgaccctttcaggcaacctaacaatatgtttacattacacagaatttttcacttaagattccccttaatatttaactaacaccactaaagaataatgcgactggcactatagctgtatcagaatgggaaatcaatcagttttcaatcttgtttggcaaccctctcactaacccaggcagacagagacccggggaaggggagaaagggatgttaggccttgagccagaggtgaaattaaatctgctttgtatctattgtgaaatctgcctcactttccaagtgctaacaaagggacaaactgggagaggcaggtgcctgatgtgtcttctatctggaaaatcgggaggtatcccaagaagtcacgctcattgcttctgacactttctttaaaatattgctcttttcacccatacaatttttgtcagtaatcctcaaaggaagataatacttggaatttcaaatcagcagcaccttgatggcaaagtcaggtatttagaacccaatttaactcttatgctcccaaacagtagaaataaaaacaacaataacaataataaagttattttacattaaattatcatggtacagttacaaagtacttcacatatattgtcttaatttacccagtggagaaaactgtgctgtttagctattcaatatatgttttgtttgattttattatgaaaatatatgaagcaaaaagtctttctccatagaaaaatcaagtaaagcccatagaatagttattagcctagcatatatgagagtgctcagtgtaggttctttctcccttctgcccctctaaagctactttggctaataggcagtaaatgttcctaataccttcagcagtagagattagttatcatttcccccattatgtacaagaaggatccattaagcatcccaagtccagggaagggaaagggatgccaagaagtagacaagaggtacgagagtaccacatccccctttctcccacaaagacaatcatgccaagacagtaggctgtgttcttctgacctactagtttgctcctagttagaccgtagacttaatcttgcagcattggttcttgtggaaaacaggatgatctgttggaataaactgagtacctgagatacaacacaaagcaggtgaagcttgtgtcagcgcctctcccttgcatggacccagtgggagataaagagattatagaagaaaagaaactgaattaccaggtcttcaataatttgttgtgatctattttttcattctatttacttttaaacctactttgtatttgtaattttattttttcttaaagattctcacttccttcagtaatataggccacacaagctagatccacccttgaagagaacttaattcaaaagaatcccacagcaaatgactgcaaccttcacagccaggccagattcaggattcaatgctaaattagtggtggattcactggtgatgccaaattggtgatatcaaaagacaacaaaccaggctcaaatatgcaagttgaatgcagcattttttttttttttttttttttttttttgagatggagtctagctctgttgcccaggctggagtgcagtggctctatctcggctcactgcaagctccgcctcccgggttcacgccattctcctgcctcagcctcccaagtagctgggactataggcgcccaccaccacgcctggctaattttttgtatttttagtagagacggggtttcaccgttagccaggatggtctcgatctcctgacctcaagatccgcctgcttcggcctcccaaagtgctgggattacaggcgtggcagcatttttattattctgaaactgatctaattttgatgaatttttaccttcctcctaggtggcagaaaaagttcaacttgttagttctgtttcttatttttgattccacttaaaatgctcccctgcaagaaaattcttgcccttttcagaattcttcccttccccatttccgtttccaaagatgattgctgagtacaagggtgggaggatgtctctcagtccggtgtccaacgggaggggcccctctgatctcatggagggtgcctgtgccttttgctgggctcccattgggtcagcattaagggggctgcctatgctgacaacaactgaggacacacccctttaaagctcaccaaacactgtcctcctgctattgacgtctagaatgcagaggaagctcctggataccttctacaccacacaggcgttaaagattttggagagctaacctcagggcatgttactttggtggagctaccactgtgatctcctcccagagcacagttgtccccctcccccaggaggcatcaggatgtgtcttctctctcccctaggaaaattccatgtcttcatttctccccacaggaaaattcctctggaaaatagcaggtccttccgttttctcttcctctcttgaacgggcttcctcgaagtcatctccttcttactgggtcactaagcctcccagctcggtagacatggaagaaaaggtgtccttcctgcattatagaaaaagcacagatatgccagatgtgtgcttcaggcctggttcttgatgtgttaattgaggctaacaggttttagatgattcgtttcatttctaacagaaccagttgttcaaaactattgtcttgtttccagtgccaaagctgtggatattcaatgatgtttatcactctccccctgccgctgcagtcctaccctgcactgctaatcctccctcagcaaacagatgcccctggaacaatgtaggggtgagcacaaagaaattcaggagaagaaagtacattcatgtaattcaaaattgttatctctatcataagattagtaaaaagcctttgttcagattttttattgtgagcagtgttgtattttttgttattgtttcaagggataggttgatattttgatatcacttagaaccgagtcggtaaactacatatttatctttgatcaactaagattctgtttttaaagaaaagaggacatctttggctagtaatgattaggtaacagtgaatggcaggtgccatatggatccttggagcacagacggacatcaaccagcaagtatttctcagattctaccctaaaatagtgacagtatgtcaggtgtggactaatatatgtaatagctttcaaaaggaactgaacaactagcaagtaaagagtaatttatattaaaagatcccaataatagatggactatggcaagaacctctgaactagtctctctgcttcttctctacctctttacagtgtattatctacactgcaatcaaaatcttccttccaaatgtaagtaactgttcaatggcttcccatgggactcggaataaaagctcacactctttacaatggccctgcaggttcctcatctcctacctccagcatcttcactgtccctctgctccaaccacactgcctctttcttattcctccagacctcccaacacagccctgcccccaagacccttccaatgactctgatcctcttccctgcgctacccagtgtctcactccatcgattcctccacatcctgccaaatgtcacctaaccagaaaggctttgttgaaccaccccagataaaataaagtcccctgcctttacccatcactctctcttgcccggtttaattctttctagcacttacattgtgataatttcttttctgcctcctgcctcttttcattggaaaatatattacatgagaggaggtttgctttattcattgctgaatgttcagcacctagaataatacctggcacaaaataggtcctcaattattatacccaattcctcccagttctcttggaagtttctccattttaccattgaaaattccacatccttgtgattcactttgtcccagtgaattccaaacagttggccatcctacccttaatagatagttgttgaatgaaggaaaggaatgaagaaaaaagaatgaggacagggaaggagggaggaatctaggacagaaaagaagggagagaggaaaaaaaggatgttaatattttcttgttctatatgtagaaagcaaaagagtatttttgtaatcttttttcagcaaatgcctggatcaaattcaatatgattttaaagccatgagaccctctcattcttggttttgatgttgcacggtatcataatacatctgattggaatttcaatatcaggtttaatatactatgcaagctggtataggctctgaaattatgcatattcatgagagcaatcacacccttacttttgatataactggcaaagtaaggtaccacaagagaacaataatcaaagaaaaagggaggactaccagttgttatttacttatgacattttactggaaaaacttaagcaacatgaaagactatttctaaatgaagtactaaaactaacaagacaatgttataaagtgtcatattttctttccttttatacaataaaacattgaaaagctccaccactatgcagccacttcaccagatgcaataatatccaaatgtgaaagtaattaataatattgtagttttaattcccttggtatttcagagatatcctttgaacagcctaaatcaaatcatactggtacttatgagaaatagatatctcttgtgagtccttatattgtgcttcccaagaacctacagtgcatttcagttatttaccttgaaaattcttcagcccatccagagtgggtttggaaatttgtaatcattttgtagaatgtgataagggaggacctgtcttcctaaattctcaagcttggaattttcaagtcagtgtcaggaccataggctctctaatgcatatatatttgccctgagcaaataattatttatctctgtgcttcggtagttgcatctgtatgttaaaaataagattattgctatgttgatttcttatgacatgagagaagaggctttaaaaattaaagaaaagaagaaaacactttaaacttaagatgggaatcatatcttattctttcatattcccagcgcctagcagaatgcctggttaactcaccgggggcattagccagttccttgtctactacatcattccatcttgtatcattccacgctttgaagcaggtactattacaccctatttgtaaggcttagagaggtctagtggcttgcccaagaacagaccacaagtacacagcagaggcatgattagaaccctgcccttctaactgcagtctggtgctctttcctggacacctgcacatctcttccagtaattgaactgacctgcatgttaagcatttcacattgctctaacacaccaaagcctatctacagaaatgttcagaaagatttgttcccaagccctcttccatgtcatgtatgcactttgttcctggcactctttgcagaccatctctctcccagcatgaaagttgtctataaaccctgtgtagtcgaattgcaatttggaatctctacaggagcccgactacattaaaccaatgcatggattaacacctacttcaacacacacaaccattctccacgtacatgggcagtttttacccaaccaaacaataacagacaggttctactcatacagaggaggcattgaaaggcacagtagaaacacagacacgcagtatagtgcttcgtgtccaggtgcattaatgagctgtggcctcaaatcccaggttcgccaagagtgtttctgctcatgtatcaaagcaaagtcatcctgggtgtgagtggaaatgctagttgcattcatgtcagcactagacatttcctggaacccattaaacaagattcattttccaaatggattttgttaatttatttttttttccttttgtagttagaaacctaggggaaaattgagaagaataaatgtggttaaactgccccaggggatggcttgtctgtagaagcatcccaggcataccgaatggcgtacaaaacagaccttaatgagtactgcttgtcaaaggatctgatatgcattttgcagaataaacataactcctttttcagcagttgatccactattctctagggaaatgaatgaagggccatatactgctgtctttgctgcccaaacatacacttgtttgaagggaaagcaacaaaaacaaaacaaaacaaaaaaccctgctggtttctctattttctaattacgttttctttccaagacatattttgttgtattggtacaaaatacgttcagtaaattcaaggaggagaaaacattccagtctgaaatggatttcagcttggcaaaaatgaattaatagaggcatggcaggtcacttatttaactaagtacaggggctgccctattaaccttgagtgagctgagagaactaaagaaaattctttgtttgtcctactgcaaaattggccaaggcaaatcaaaacaagatgcctgggcaaatcaaagtgacacgttcaaaataaaatcatgttaatactggttgcaaatgaaactttattagcaagtcaactttagtagaagtgctgtctgaatgtaaaaatctgactgcttgaaaataacacgcccccagtaattaactctcctaataggactacaattaagatctcgtaggacagcatttcgggaatttcttcctgcttattctcaccatatatatttcttatggctgcaggttagtttatacctccaaatatcatatttctcactagaaatagcactgagtaattgggtgctgcagggcttactgttcaatactgagtcattttgattagacccatattttatcacttgtgccattagcatcagacatttttttaagccatgaaactcctatgttcttggatttgatgttcataaaattaaggaaatcagtttctaccatctatttttctcttcaaaaatcaaattacgtgacatctcatccatgtcaaggcagtctaaatcactgatcattttccatctgaggctaggtgtgaagctaatccattttctgtaatgaagcagcgaagctaaagaagggctgagctatactctgaactatggaaataatggatctaatttagatagttaatccagccatttctgaatagtgtgcactcatgtttgttgagctaataatgtccatcttaaatcaagaagacatttaaacctttatggaatatctttataaaatatcaacctttatggaatgttattaaaaatgtatgtatggtaatggacaattcttcaccagtgctttggatattctgccctcagaccaaagatgcttatttttcttccttccctctcttcttccttttctctccctctcctctttcctttctttctcttagatcttcagtaatttctctgtactccatgcagcatgtgcagttgcttaattcaatccatcttttctttttaaaaatttttccaatctcataccttcctctatttactatgataaaactcttctatacttcataggaaactacttaaaagaagtatgtaccttcaatgtctttctccctaaattttcacttacttctaactcaaacagttgattctttatactaacacatgaataaacttgccaatgacatcttatgttgctaaggcttatgcgtgcttttattgtgtttgtttttactcatttttctagagcatttgacatatctccttgtcaaagtgttctcttctcttgccgtgggggacaccactctggttgttctttcttcatttcctttcttggatctcctttttcacccagaaatatcgttctctccaaggacttttttcttggtactctcctttaatcgctcaatgatttcatacaggcccatgtccttaggtgccacttctttgttcatattcccagcctgctgagactcaaataccagtgctcttctagatgtctctacttcagtacccttttagacaactaaaacctcaaactgtccaaaattagcccctcctttcctctctcgaaattgctctttgacttattttcctaatgttgctaatggatgaggcttctatccaggcctaaaactagaatctcagttatccaagtgtcttttgcatttaattttacaccagatattatctattctatctcctatctgtgtacgtcttcccattcataatgccttttaattgtcatttcttcagtgaattacaaagatatcttctgaaatattatcccttcttctggtatggcttcctgcaatattcaattccaatgtcatgctcttgattaaaatctttcagtggtcgctcactgtttctagaccttagctggaactcttggaccaaaaaatgtgagctacctctgtatccacctactttttttaaaaaggcaacttccgcacttataagggacagtaatccttgtgccagttgaaatattttcacagccatgattttatcacagactgtaggaaacagattctcttgcttctagaaagcatgttttgttagggaactgtgttgaattcttcacctcaattaacctttattttaaaccttctgagcatcagaagtatttactatcttatattataaatgcaaatactttttcctggatcaaataattgaagaataactaggattatgaatgggaaagaaaggtttcctatgcctgagtgagttgagttgctgttctttgcttatcatatataaagagtgagtgaatttattatcatcctggtatgtacatgttaactcaaaattattgtggtactcactgtactttgtactattgggttccaatggtttgtaagctagtgatttatgcacataaatccttaattcttaactaagaaaatttagaaattttaaaatttaataccctattaagaaaaaagggtgaattttcctgtgctctcttatagcaatcatcttatcaaaaattattgcccttttgagaaaagtacatcatgataacatcactttgtatcttctagctttctctgatgttaggcattttttcttaaacaagttaaatattcctcatggaaaaataattagccaattccttaaatttgacaaaaacatcattcagaattgttgctatcattccttttttttcctctttttttggatattttatgtccaggcaaatgggggaatgattggctttatattctttacatgaactgtcttttttcctgcctatcctagtaatatcacagcatctaatttattttcttaaccacataacatatcctttcctcttttctaataagagaatatagttaacttaggcaaatgaagcagtgcctgtgacatattaagtgctattaaatgctcaataaatgtttcatgactgaataaactcaaggccaggtaaacataagaatagagaaaaaataagagtgaagctgtgattggtagttttttgtttgtttcatatctataacctcttggtagcttccccaagaatagttaattgtccatgtgaccaggactttatatccttatgtcacctacttctgcttccttcccccaccagtttctgggaagaattttgccagatcaccagatgcacacagttagctactaaagaatctcttgtctgtctctttagcttctccataaatacacacatttcttcatttgtttttaaggcaatgctgtatgtgtaatcatgtgtgaatctttattgaacacttatggaataagccacctgttcttacaaattagctgagttctcaagaaggcccaaattagtgaattagttgatgaaggaaatttgttgcggagacagcaggcagctaagaaatttttcagcttgtcaaaggtattgttagtctcacagcttggcaaggagagaagaagataccattttgaagaattttaggtagtgtcttaataccttacactcactaaggacgaaaatgaaattgcttgtcttatcagttaaagggaagctttgctgatgtcagaccatagcccagaaagttaactaaaagttttgtagaagtagataatcttttcctggtgatcgatgtggtgagattggaagtgagttgccaggggagtcatggggaaataggcttaatcattttatttgtatttgtgctgaaggcagtgctgaacaaacctctgaagtcacttagccatgtcttttccagggggcatgcaaggcgactgctgatttctacagacactttttaagcgattaccagtgctggcaagtggaactacctttccggtcctcttacaagcatccagtcacttgctgaaatgtcataagcgatataaacctgctgacaggccaggatcattgcatctcctgcctcctccttccacgtaacaaatctcattgttgattggcatatggcagcaagcatcccaacacccagagtggtgttcttatttctgagggagcagggtctgtgtgtgaattgcacacacagggagcaatcccctgccctgatacaggcaacctgagtgcttagttccttctctgctcagaacttagtgtgactatgtggcctacctcacattgtttgtgttacacctacacaggaaaaaggaaaaatgtccttttgattccatgcttgtagagatgttcatccaatttgaatgaacatgtagccaaggtagtgtcttccccctttcttctccttttttttttgtctcataggtgtaataacatttcattttaaaaataaatatgaaaaatggaaaagcataaataaaaaataaacacatttgtgagttttttatgcagatataaatactgttaatattttaatttttatcctctggccttgtacttctaggaagtaatgaatggtctggttctttgggtccttggagccagtgtgggtaggagtggggttggcagggacagtagagaaggatgcaaggaaaatatttgctctggatagataattttgtctttttcatccaatcttatggggaagaaaatgttcaaaattcaataaatattcattgaacacctactatgtgctaaggactatttagatagtagaaacactgcaataaataatgcaaaatgcctttgtgaaagttataatctatggaaaatggaagagagagagtagaaatacccagtatgaaacttgacaattcaatacaaagtagccaaattatttaaataaacactttaagcacctggtatatggcacagttttgagtgatgatgtgttaaattcaaaatcaggaatttttatctaaactgtgtatctacaataatggattatataaaatgagacagtcttataagccttgtttctagatattttatagccttttgacaattatttaagtctgcatgtagaatttatcaccacttaagtagaatctattaggaccgtagaatctcagagatgaatttaaatggtctaccttctctatttctattatctatactacactcctgctcccatggctgaatcctctccctgatacattaagcagtaattatcagcctctttttgaaatcttcaggcacaaaaagctctctacttcctgaagcagcccattccaccaaccagtagctccaattttcaaaatgatcttccttatattaatctgaaattcaagggcccatagtttcttccgctgaaagtatgtgcaagtctctgggaactatctcaggcagttgaagcctggggatatttcttttccaagtttcaaagttcaaattgccagaaagagccctgaaagggtctaaggtgttaaaggtgtccgtaaaactgatgaagaaaataatagcttgtatcaaagagcaccagtagcatgtggaagaatgggttgttaggggatatggctttgatctgccactcgcttgtcagcagagttgattcactcacttggctagttgagaaggtggcccttcctccatgtgtggtcttcctcaagccccatgctaaggcaaagaagttgacctaagctctgtcttccataggtcaaaggtacctgaatagttgagttattttagtagaaactctgaatatggaattgcagtttgaagcagccaaaatattcatttttatagctgagaagagactctaacatgcagaacatgttgtcttggagaagccagtgatgaaatgtgttggtttgagccatagcaacagttcacctttatatgcagaggaaatggaaatccattttaatcatcaatgaaaagataatcattctaaagttcctttccaacatctatcacaaacatactaagtttccttctaaaaataaaacaactgagttttccctccatcttgtgattttcaatggaacctgaaagctggtgtcctatcctcttatgcccttggtggccagtcaaaagagaacaggttttattcattaattacatcattgatttattcaccaaacatgcattgagcactcacgctgtatcagacacaatcgttagtactaaatgtaagaaatcctgagatcctcaaataaaatagcagaatatgggtggatttgagtagactggtttagaagatattgaggaaggtgatttgatggtaactaaatatgagagtagtgagcgcattaagattaactctcaagtttcttatatgaggagttggggagatggtggtaagtccacaaacttgggtaaggcacccaattttacaggagcaacatactgaaggaaatccgtagggaaaaggtgaaatggtgtatttaccaatgatggtatttgggcatcagggtctggaagctcttcttcagatatggaagcccaggcttggtagtgtagtggactttatggtagagaagtagcatcttttctataaagaaccagattttctttttttttaaataagagctcctggttaaaagctgtgtgtcagatcccatatgggggctctaagatctaattttacttaagggccccaaggcacagaggctagccaagattctgagaagataccaaataaaaatcttggaaccaatagaaagcaattttcataattaggaggaacacggcaccccatatatcatcattagtctgagacaaggaacagaaggttggggagggaaaggatggtttctctaaacagggaacaggtggccagtgcagtcagggccagctagggaaaccttaggcaactctgctcgaaaatttctctgttcctcccctagaaactctcagatacagaagaaaacaggatgattagttattggcaattagttattagttattggcaatgggtgtttgcctccatgatagtgtttttgttcttaacagagacacagagaaaggccaaagggtagaatttaatggcacccgtagacactgtggaaaatgaagtgtttttgtatgtcctgataaactgaagttttgatgttacaaaatgtccaaaatgcaatttggctttcatttgaattgcttcctgcaaagttaattgtttgctcccaatccataattgatgatagcttttcccctattgcagttagaccaaggaatcttggcagtctagtgctatagaagccagacacatgcaggtaataacaccccaagaagagctgaaatattagccttcggagacacaggctgtgcaaatttctctggcttacaaaagagacatcagttacaccttagagcctgtcttgtagacttagtttcataaaagttgtataataattttggaaagtacagatgacatgtcagaaaaaatgccagaggaaaagctctggggagcctgattaatcagtttcacagtaggtataaggaatgagggggttctgatagctaaagtagtgatttgcatgtctaactaattttcttctgccatttcttctccattcccatgatatccagtacagagtgaccatgcagtgttgattgatcgaacagcaaccaccacatacatgtcctgccccaccacaaaaggaaggaaggaataaaagaaagaaagaaagaaacaaacaaacaaacaaacaaaactaagcaagacaaaacaaatacccatgtcagtggttcaaagattaagattgtggctttgtgtaaagttctttccctttgtagacttgctgcataattattcaggtatgatggttacagtttttaaaaaggaagggaaattgtggtatgtggtatgtaaatatttttaaatgttgtctctctgttttgatcagtttttgttttattcaatttgtctttattaaatcttatcaaagcaaaacttgttcttcccatttctctgttttgattacaggactactgaatggagagctttctgatttctccaagggaattgttttgtagaaaaggccatgctagatttcccttgccactgcctctttctgcttggaaggtaacctttaccaagagctatagcctcttaatcttttagtggaaatcgctcttgtgaaaacgagccctgatagtatcttggctcactaattcatgccatgccgctcaaaattaaagcattaaaatttcatagatataataccatttataaatcatgtcataaaaacattcattttcttatagaccttgaaaactgggcatgtattcctcctccagctgttgcttaaagttcattacagcacaccagtatttgtcaaaaacaaagctctggtaaagtggggagatatttaggagcaacaccctcagagcatcaaggcactgtcctcccagcattgtgcacatgttcctcccattagtggtcatggaaactgcaagcccacctctgtgtaatcagagattcccggcagaattgtattaatggagcaagtggttctgggagggtagctttatcattctttatgtccttattctgttcacttggagaaagagactatttaccattttccctaaatttatctcctataaaatttcaatatgtttagtggatgaaggcaacagactaattaagtagacggtaaacatttgccacatttcaaaaaatgacaatgacagacgattctttttgccatttacccttaggcagcagatggggacttgataattgtttaagcagcagaaataacttgccctaatttactatctagttttttgtttgtttgtctttgattatgcctgaataaaaaccttttgtccatttgaagtggtggaaattagaatatccattttgaggtgtttctgggatgtacatgccacatatttggcttgcagatgctaatgggtatctaatcacatttgccaaccataaaatccctattggtaaaacacttacatctgcaataatctgccactttcttgaaacatgctaattttcttaaataatgtagaggcctataaggacttctattttatgtaaacaactagatgtagtaaacaatcagttgcaagaggtcattatatcataatctggactttgttacttttcagaagtttggggtttttgtttgttggcttgtgttgtcttgttttaatttcatcgggctagcatttcatagtagagtattaagatggattctttgacctttgatatgaaaagtagctgaaccatctttttattgcttgatttgttggattggagaatattttatctattcagtattaaagattagccctaggaaactgggagctgctctaaaatatggaatttctaagtcgagtgcattttctccaggctaaaataaacctagacacagatatttgatagtgtagaattcccttaatcttttaggcacagcatctgtatgctcattcacatggactcgttttacatacactacctacccatgccaccaggatcatttatctggtatgtaaaatctgatacgtgtttttgtgctaattgaaatattggtttgtttgttgtcagcctcagatgccttctccaacaaggctaaaaacaatttcaagcagaatataaataagacgcatctgaggatatacctatgcatacacaaatttgtgtgtgggtggacatacatatattctacacaaatgcactgagggagagagcaagagtgagtttctattttcattctgtcgtgcttacgtatattcatatgatttcacattgggtatagctttggatctgagaaaaccagactattatatgtctggtaacttcactggaaaatctgaaagaatctaaattagccagtcctgctgatcttttggatacatgaattcatatgtccactaatttgttttctttttgctttttattgtggagaggggagaaatccaaacatacacaaatataaacagaataatataaaagaaacctctatgcatcgatcaccagctccagaaaataccaactcattggtctctgcagccccatcttcatcatcagtcacatcttcccaacccttctcccacctgttttttttgaggcaaatccaatagcatattatttcatttcaaaatattttattatgtactttcctaagataaaaacatagtttttatatatgagtagaataccaatcccacactaaaaaaattcaccgtaagtcttaatgtcatcagatctccagtcaatgcaattatctaatgcatcatacattttttaagaaatcataattcaaataaaatacatacattgcttgtccatagattgatttatcttgagactttttaaaacatatgggtactcctctccttttctttttttcttcttgcagttcatttgtcaaactgcaagggaaaaaaatgattgtttgtcctgtagcttctcacagtctagtttttgctgattgcatccccacgatatagcttaatatgttctttggtctcttatttactgtacttagtagttagatctagaagttttattatattagatttttgtggggttttcttttgataagacatttacatatgtggtcttttctacttaataaaaagcacactatatgctttatctctttttgaagtgctagccattaatgttcaatgcctaaatccattagttgattagagattacaaaatactggtattcttatcttctcataccttcatcatttattagatgtgatatttttataataaaaatttcctcctttttattctttggtgaccagtagtacaactagtgtagccaagggaggttaaactcttgattcttttatttacagttttcaaaattatcattagttccctacagtatccctcggtactcaataattttttactatcatgaagaacacatggatttaaaatttgttgaagtatttcaatctattgcatttacatcatccctgttgatgctcaaattgtcccatctttggcctgtaagaggctctaacaggttgttctacattcttttgacagattcatgtccactcttcactctgtaggggatatggaatcccagggattttggaaattgctgctaccctctccctttcactaggcctacgctttctgtttcttgctctttccggatgttctgtcacatgactttaacttggagatagctcctgaaggagccagtgtttatatgtaaattattgagaaacacaaaagtgccagaacacattagttttcaacaacctgttttattcttctcacatttttatgttatcttagggaaccagcttcacctggtgtttggaattctaactttttggtagccccttagccccaggtagcaaattgctgtactctttttgtgtcttcatcactgtgtggcttgtggtagtcacttgaatacttgttgaatgtatcagtgactgaaagaacaaataaacaaataagctcatgatctctctttaatttaaggcataaatctattttagatatggtgccatgaaacagaacaatcttagctgataagagagagttgatattgcatgtgcagggtgagagtacatttctgagtcatttgggagaggggcttcaataggaaactgtcccttgaatggaaaagcattccctgtacagtctttcagacactaattttgacaagcaccaaagcaagacacatgctttggagtgttatgggattttatgccaagaggttgaaataatttaatggatctggagagggtggaggtagcatagaattatggttgctttatccatttttttctgatctgtttaggtgatttatctattctgatttccctgaattgtttagtgctgagatttcatggaaataggtgttctaaaaaccactaaatattgttttttaattacctcacggcctcaaaggaacaagtaatcctcatcttctttttattggcactaaaattctctataaccaccagatcccataaagatcattctttttaaagccttgttttttactaaggaatgttgattttctagatacatcactgcaggatggagtcaggcaaagaataattattgtcattcaagtcagtgtttcataatctatctgggtgctaagagccaccccaattgggaagagtgcatgtgttataataaaattatctattcaccagacaaggaaagcaataactttgtagcatgtcatatgtctgtgttcacatatatacacagctggggagcaatggtaaacagtttcctaaacactcactaaattcatgcttatcaagtgtcttattccttaaaccaatagtctacacagacatttttactgtactcactccaaagtaaataatttttgagcatttaacctcagcaaattaggttgaaccatatgaaattgacaatttgtgggtcaaaaatacttgaacattggcaatttcatatttttcaaccttctaattttattagttacaaatatgtacatatgttaccatcatcattaattaatataacaagcacaataactctttgggtaaggatcaataatatattgggtgtaaatctgcatttccagtagtctcttgggtaatttctaaatcattgagttagttctgatgagatcagaccatcacagtttttactctgatactgtggctagctagaaacttgccctaggagatatgtcagctctgacagtttcttcttgtgtctaatgtgcttgccttgttactatttttagtcaatctatgttttctttgcagaaatctttttacgccgcttgtccattttgagagggctaattgataagttgaaactaaataatataatacatatataaaccagtttgactagaccattttattcagaatatgttgcacagtactcaaagagaagatttcacatgttgactctgacgtgcagatgaatgatggtgccgtagacaattaggatattagattttagtagaacttaatttatttctaatttttccagtgacacaatggatataaatgaaagttcaaacctagtttgagttgtgcctcccacaggcagtctttccatgtggcttggatttataacaacttggtggctgggttctgagacagagcatctgaaaagcaagcattccaagaaatcaggtggacatcggatagactttcatgacccagccttggaaatcacatagtgtcacttcctcatccttaattaattaaagcaattacaatcccatgtagatttaagaggagggtacatagatatctctatagaaggaatgtcaaagagtttgtggccactgtttataaaccaccacaccactcaatgcataaatcccttaacaaatggtcatccacatttactacctctactgacaaggagttcattatcacagaatgtaaactattccttttttgggacagtattaagtattaaaaatattttctcaagcggaacaaaaatatgctttcttattacccagtttttgttctcccttctgccctccggaacacagcaagtcagctttcctttttgcttggaagtagttttcaagtgaattgtgttttcttttggatgttcacactcctagttgctttgactctttcctatttctctcatcatgtggttatcttctaagcagacaatactttatttctatttctcttaaagtactactaaatttgaacccatgtaccatttaatactgcccctgcagactgggttgttaaaatactatttgcgtatgtaatagtttctcaaaagaattatctatagaacaatttattagtgcaaactgttaatatataatttttcagatactcagagtgccagcatactctgagccaatgagagctgatttgggagactataccggatgctgtcaggcagcaaatgtttgtgccccatatggcaaatgttctcagccagtgaatactctattgtaccatactcagttgaaagtcttcagcaatgtttgttatgtacccctcaggagcctttctttctgccctatatttttgtgttctagtgaactgtttgaaaccataatggccgacaaaatgtatgcaagtgatagtgctgagactgaggcaatgaaacccaggaagaatattccactggctattgacatgcagggcttccagcagtttgagaagcctttgatgaaaaggtcaaagtaacagatggtaaagatcagcaggaaattagggattggtataagtccttttgacattctgaagggcattataaaacatccctgtaggattgcccaacagttgtttgaaaaattcctagaagaagaaactaaggttgaattatgtcatgacttctagtgatttaacaaaaatgaaagagtgcctgccactgtataatgatttaacaaaaatgaaagagtgcctgccgctgtataatgccaggaactcatctttacaggaactatgtgcttaggacgctgtgtgatgcagatatactagctactctttctttttcagaaatgagtgtcccacaccacaatcatatttccatattctaggtaaattttgatcagagaagactgaagtagaattaattttcctacaatatgacatttttcatcaactacttaaggtgactttagctttttaaacagctacataacaatgttgacccatcttaagcttcttcaacaaagatctccatatttttttcaggtaaaagtctacaaagcccaattctgttcctcaccaccactctaatatgtaatctgatcatggtggtaatgaggaccatgactaatgtttattgggcacttgcttagctccaggcacaattaagtgcttttcactatttcaggaaatcctcaccacaaacctatgaggtagttgcttttattatccctatcttttgcatggggagtattatagaagctggataacttgcccaaggtcttatagttagtaaatggtggagctgggatcagtggagcagttgggatgatgtcagatgttgaacatgtcatttataatgtcaaatatctatcccaggttggattgtatttgtaaactacatgacagcaggatttgatctgaaacagtgcttgcttggttcagaataaacgctgaatgaatgaatatgttgtaagcctgttgatccatgaattcactaataagcatctgtgatgcaaagcccaattcctcctgctgcaaatcatgtctgtcaatcttaatgtgtacagaaaatgttttttaaagccatgatttcataattgtagggttccaggaaaacatcctcttgggagagtcagcagcattaaggcatagcaatatttttgttcaggatgcattaggtatctctgattttccaatatcttaaatgctagcagcagcttcagatatgaaattacttagtaagcaattctaataggagaaacaagatctaaaagagaaacatataaggaatcctacttctggctctcaatggaaactggcatgagtcatgctagctctaaagaaatatggtatccaccactgaaatcatgcaacaaaagaaacttagctgaaatggttgaattgagctttctcaaaggccaattgacctattttgtccgatggtatgtggaaagaaatgatatacgctacttcccagcagaaaatttcagaggccttatgtaatatattgccacatggggctttttctctgtcacgaggccagcaatatcccaaatatgagtgttagcctgggtcccagagtgaagaagacatctacccagcccattatgataaagcagtactagcaagaaataagctaagtccttgaggacttgggattgttaccacagcatgtgtaacctaagctgactaaaaaattataaatattcttggccgggcgcagtggctcacgcctgtattcccagcaattttggaggccgaggcaggcggatcacctgaggtcaggagttcgagaccatcctggccaacatggtgaaaccccatctctactaagaaaacaaaaaatcagccgggcatggtggcacgcacctgtcatcccagctacttggggggctgagacaggagaatctcttgaacttgggcagtggaggttgcagtgagctaagatcatgccactgcactccagtctgggtgacagagtgagactccttctcaaaaaagaaaaaaaaaaaaaactataaatattcttaaggaaatcagggctgagggtggagaaacatgttaggcataagaggaagaacaacaccttgcagtcccaggcgcttccagagaggcgagagcctaagcgcagacaccacctccaaggcatagttggacacactgggtggaagggcaaacacagagtagatgcacagttcatgctggaaccagatccacagttgagggcccaggaataatatgaaagaaaacagtatcttcatgtggcagaaagtgaataacatttattttagcattcatttcatctaatcttattgctcttccctatcataaccaacccattccataagcccttccttagaaatacatagctctctaccatctgtcagtaccttaaaatcaatcaaatacccagtggatttttattttacttatttattgcttaaaagaatagctttagattatgcatctcaaagtctgtggcattgagaagtcactggcctggaataccctgccacctgcaaaaatcaactaacctatctcacttcaatccatttcaaatatttagtttctaattagatttcatttgtgaaaagggttctacaaccaaaaatgcttaaaattactgcttctgacgaggccacgggctcatttcaactactttgaaatgattatcatcaaattctgtggactctgttttggtctgtcctaatctcaacccttcttttcagagcatgtggcagaagcagcttcactacagagataaatattcatgtgcattgcattttgctcacaggcactgtataaactatatttagaagtctgaatgttgagatgtactgtgtcaacattgaaatttaattactgtgatggactttaaatccatggaccttcttgcactgcggagtgaatattacctcttgtgtttcttcattctcctttacattcctatagaagagggttgcaatctgcttaactagaacacccacctgcccttctcctccaagtgaatgaaatgaactctcagttttacgactgttttatctttgtgttgtgaaaaagaaatattgtcttgctaaactctttggacacttcccaatatgcactatctctctcctactcctattatcactcattctggtaataaatgataatgttcattgctaggatttgtaaagcactgtcaagttagcccattattttaaactcaggttaaagtaaggattttagatttatgtaagcctggtgcagtttcattaagaaccaaaggcattttaatttttctccctctacccaagggactttacacttcttaatgtgacattaatcagtgttttaatatttcttcaaaatgtatctattctctgcatgctatttaccgtctttgtcaaagtcagtgaacaggaataaaaagtaactacatgatatagaaactatggtcttcttggcccttgtgtaatagccaagtggatgctgttaaaagtgaatctatccatggtgcctttcctatttctgtacaggattttgatttcattttaaatgaatgtcataaaccccaggtctgaaaactaatagaatttttgcatttacctactgatccataacctttaagttagactgtgtgtccatttgcagtcagttcgttggatgatgcaatgctttaacactgaatgaaaagatttctgctatattccagacaccagatatgaaggccagtttgggtggattattcttagaatgactttatattagtcctgatgggtagtacagaataagctgtaggagctagctacagtcccttaaatgagaggagacaaggaaagagacgtgtttgataacatgacaccgactcactttgggaggtggaaggctaattaggagtccagggattggcagaacatattgtctgagtcctggtcagtacacagtgagtgtgtacactgttgctgactggctggtccccatggagacattactgctcgatcagttctcctcagcgcctgtgtgtccagagctgtgactgtggctttgagatgcctggctgacgggcaaagttctctagatgctgagagtccggcgaacatgtggaggaggctgcattctgctgcccgtcctggccctgggcagtgtgatgcagcatatgcttgcacacaacgaatcaggtccaaatcccacttctaggcttactggttgagtgaccttgggaaaattatttaatctctaaattggtctcttcatctgtaacctgatgttggtgtgaggattaaatatgataatccaggaaaagcatcccgtcaagttctgggcacgtaatggctcttgataaatggaatttaaaaggagagcctgtccctcaggcagttcaaatctgatctaatgacttccaatggatcaagagacgtggcatgtgggtggaaaagcctgaaggctgggattggtgagtgggacgctcaggttaccaacaggtgtagacaggtcctgctactggctgtggcagcaccagttctccataaacatccatcggttaggatccaccaggccttgaggagagtaaagagggcactaggggacctatccctgggagacctggcataaatccaaaggagaggaaggtgggaaacagggatgatgaacatacagagcacatgtttcttcttttccatttttaccggcagccagtctgctcctgaccagaccagatctcagcctagatcccattcctctttgtactgcatattcccctaaagacatcctaaaagagaatgatagacccagtgaatgcttagtagccacaggtagtttttttgtttgtttgtttaaatagggcctgtccaaagaaatatcacttaaaaaaaataaagcattctacctagttttttttttaatgtagccatatccaaataaagtgtatgatcccttccccacctatctcctccctttcatgttttcttggtttctgcttttctaccacagaaaactccagtgtctttgtgctacgtagaacacaagggatgggtgaatcaaagttgctcagaaatataagctaaggaaaagaagaagtgaattgaacttcaaaactaatagcacaaaagtaatgcacttgatatttgccatggacaggatactgtaaatcagtgcgtgtgctaattggccatttgcctgtgtatccttaaatccatttccctcccttcctctactctgctgtcaatcacaggaaacaccatttgggggctcccttgacaactagcttctagtagttttgacaatcacgggtactagcagaaaactgtaggatgaggaaaggggagaagtcaccgtatttctccctctgccttggggaggcatttccagcaggaagaagctgtgtcttctgtggctccactcccagtagacatccctttccttcatggtcccagcttctgccaggcagccactaggctccacttgttccagcctgagtaactggtttctggaaataccacatcctagaagcagtggcttcctgttcttatatatctttgaattgcctcctctgtccctgattagcttttcaggtcatttatcatctatgtaaccaattccaagtattaaattttctctgtttaaagcacttagagtagtttttatttcctgtgtagatcctgactgatacactggtgatttgaatctattctgctcaatgaattagtagaatgggaaagttaatgtatttaaacagctatgtctctgtgcggctctgaataaaaacaaaaatgcataaataatgtactaagacatttcatcacagcaaaacactgctttggtttctgatatttcatgccatttgcaaatatctccttatttgttattctggggagttttcattagggctaaactatttcacatgacaagtacttttacagcagtttgcaaaaatcatgcactttcccaggttaaaaagaataaccctgaactaaattttaccttcaccttgtgcttcctgacataagtctcatttctaaccaacagaccttcccagcaccctggtgtaaaggaatctacctggcccacaggacaaacgtgccctgaccagctttccacaatccccttctgagctgaaaaaaaatgtattaagtggttaaagaataaaacttggtaattcttataagaattcagacaatgaatggcttataaaatgggccgttaaaataattcatgtctgaaattcagcattaatatgatgcaacatgtcaggtgggggaactgactcctcagagctctactcctaactgcttggctacttgagtaatattaagagaatccatctgaaagaaagggaatagaaatactgacttgttctaagggtagcttaaataagctttgcaaatagcaagatcccactacaagcagatgaactgggcattcagatacctaatgagttagaaagcaattcttccttgatacccagcaccccttcatgcatctagtttttgtccataccaaacttgggaagtagggatcaacaatcgtccttacattctccctgagaggtgggaggagggctccagttctgctctcgtaatccattttttattcagcgtcaccttctctttcaatgggctaagtatcctacaaactggggatgcatcttaattaattctggccaggttcaatggcatttaagagcaggattggcaagtggccttgaaaatgtgctcagtacagccaagttgtacccttgaggacctctatacttaagatgtacctgtgtttctgctccccatcaactgggatccatagatctctctttgtaatcaagacccatactttactgaggttctgagcagctgctcaacgtgaccacatttcatctgccattactttttagtgtcttttaatatgaaggaatgcattcattctgtaagaaaaatgggattagaattttaggaaggctctcaaataatgcaacaataaattcttcaatacccagttgtcagatgtttcagtaaattgcaaatatcagattactttttaaaaatatttcaaacacacacttggaattaaacaagaaccatatattagaaaaggaaataagcttaccttttctattgtaagactccaagcacccacatggatcttcatggtggagattttaacaacactgctaatactgacttacttccaatcagagctgagagagcaaacaaagacaaactctctatggatgtactcatttttttaaacccatatttaaaattaataattttcttaggcattcaatgtgaataataaagctgaactcatttatttaaagttgtaaatttttaaaatagctctaaattagttctctgtgatacaggaaaccagcatgcagaaagccagtaactgcctcactgtttcatccctaactgtgggatcttgggcaagttacttaattgtacttgtgtccattttctctggaaagtgcatatgataacagggctcaccttggttggttattatgaatattaaagtagatgattcatttgattattattcaataaatatgcattgagagtctcctgtgtaacatacatggagcttgccctgttgaacttatggtttggaaaaagaaatagaaattaatcaaagaataatataaataagtgtaattatagctagataaaagctactaaaggaagatatttgatgctctaagaatacatgacaggagactgcacttaatctgtgatgataaaggttaggaaaggttccctaaagaaatacaaaggagatatgaaagattggtaagagttaaccaggctgtgtgcgtatgtgtgtgtgtgtgtgtgtctctgtgtgtatgtgtgtgtaggggctggagtggacatttcaggcaaagggaatagctggcatatatacccaggtttcctctggaaattcaccaccctgaggcaaccactgttagcctcccttccagttatgtttatcttttattttcagctaaataaattttattttgattcaaaagtctggggaattactttgacattaggtgtgtgtgtggtggagggtcctctgatgatgtgcctgtattttttccagagagcccagggcaagtgtgtatgatgcagatttatcctggacatacatcatgggcacatattatcattcattcagaaaatatttatatatttatcaggcacctgcttcatgccttgcattaccctaaacactgaggataaagatgaataagacacaggctctgtctaggactttaaccctcagttgagtgagggaaagagataagaagacacatatttgtattatgccacatcagagttgtgtatgtgaggtaataaattcttgtagcatggaaaatggcctggctgcctctacctgggagggccatgaagactacacagaggaggtcatatgtgagcagaatttaaaggaagcctaagaaggacgttccagaagaacatgtactagggcacctcatctatgtccctaggacctagaagaagagtgcctggcatgtcatacctcaataataaatatctatctaatttacaattggcacggaaagaagttctgtgagttattctgagtggatcaaacatagcatgcaagtaaagggtcaacctgcagagaagtggccagaaatgtaaagagagataaaattgtgaagatgttcttatgtaaggtgaagaatcccagatttgattccctagtttaagtgatggaaagcaactgaagccttttaatcaaggagaatgacataatcagctttgctttatagaaaactcactgtgtcagcagtttaggggatggaaaagtgggagaaaagacttaagccagagagatcgtcaagaagagattatacttgtccagaacagagatgatgaggtttggagggaaggaagatggaaagaatgcatttcagaaacattttgaagtaaaatccatcaagaatacatgggattaaggaagaacaaagagacggggtgatgaagaaatgtttctggcctacatgactgctgacaccattcattgagatgggaatacagaaatgagaaaagggttgagaaaatgcaagatcactttggggcatggtatggataaggtgcatgggtgtatgcatgagggaactgtcctgatggagagaccactgggcgtcttatacagatttgggaatcataaaattgcttcccaggagaaaacagagaagagaaggcacccagaaagcatttggagcccctgaccctggctctatcaccgcccactcctcttcacctcagacttcctggtcactccttcctactcactgagggccctgtggactggctcacatttccccactgcccaaattcctgctcttgctcagccgttctcccttgacaaactagctatcatatcaggtattgaccttttcaggacaagaaaaccagaataaatgccaagagacatcttgccttctctagcatagcatttggggacgcagaggagaggatgtgtgccttacataacttggaatggtggggagtgaaaaatcttacagagaagccaaagactattttatacaaatccacttttaaaaggggaattcttttccacatacaaagaaccagaaatactcattttgtcctccttttttttttgtttaatgtatatgcactcacagttgctaagaattaatactgaaaacatgattttttctaaataactccttgagaaggcacttaaagcctccatttgttatccaaatgtaacatgaggacaagaacagaagaattatttcataaagaaaataatcaatgaatcatttatcagttttcctaccctttgtatgacaaattgtaattagtatgatgtctttgttggcaagtgcttatcaaacaaaatgcagtacagaagcaaaggaagattctgtaaagaactgtgttgttttgaagacctaattgtgatgttatctctggaattttctgtgattacattgttaatttttaatctggtatccttaatagcaacaaggttattagcacctacctagagttctgaatgcccacattagataacacaatcttggcatggtgaacccttggaaataagcatttgcctaagatagaaaagagattcagaaagctctgatggccttggacagggcagaattttgagaaattgaatgtggcagaataaaaagaggttttatcaagcatctttctaaagtgctttcataaattttctctttggtaaagaatgtaccacacccgatcaagagtgttagaattgcttctcagacactttatctgaaattctttactctactttccccaaagtttgttttcactccaataattaatttttgagtgcctactccttgtgatacttgttggaaaatcaaagataaatgggacccagtctctgctttcaaagcactcacactggcatctagtgggaacacaggcctgtaaacaaatggtttcagtatgatgtaagaagcatactgatgtggcgatcataggaacagggatggcagaggagggagacctactcatttgaaataagccacctactcattaatagaatctctgaggattactacgattcccacagagcccatcacaagtagcatgagaaagaccccagggtggaagggggcccttgtgctgccccttctccccttatttagtcagcatggagcccctggactggctttgaacatggctctgaacagggcttaggggataactttcagtgactgctgaaatccagtcatatgactatgtgattttagtcatggctcgtggaaataaatatgctttttttaggagtataaacgtaaaaaatactaacaaaaaatgaagctatttctacatatccagaactattttttttagagacatagcagtctcatcagtcaatattacaaatatgacattcttttatttccatctgcaaaattgttcatgaataaacagaaaagaagaatacacctcatctacccaactctttaaaggttatagcctgctcttagaaacatgtttgtcccttatctcaatacctatattgactttcaataccttctaaagaaccaaaggtctctaataccctcttgttcctctgttttcagaggatgtgtgttaacaaatttaactgtgtaataagttattcttaattacattcggatattttctcctcctaaaggaaaactaaataacaatagataaatagatggatggatgaatggatgcatagattagctagctagctagctaggtgatagaatagatagatgtagatagataaatacatagacaatagataaagctgctcctttgggctctttaacctctttgatcatctttcaataaactatgttaccacttaattagcctgaatgagtacctattgcaatgctgattcttgattttatttatgtgaccactcaacagatatgtctagatatataagagaatataatacaccattcctcatctgtctacagcctttccaaggaggtaattgatcatagtatagatagtgttgcactgtatcccacatcctgttttccctattattagcattttacattaatatttttcatttgtcacattgatacattacattattattaaccaaagttcaaatttcattgaaattgtcttagtttttcaaaaaaaggagagctgttttgccaggtatgtcctgcagaccctggccgagcaatggatgaaaggggtactcagacacaggtatacagtgtaagagcagctaggggactgctgaagagtgaacagtctcgataagctggggctccttgcttttgtttagtacagacataatgccgaaagcctgaagccaacacaatctgtgggtaattaacattattgttcctcctttcagggagcagtcttgtgctggcatggtcaaaggtcagttcctggttaacataagtaaacaagcctgtttacgctaaattcccctacacttccttgtacctactccttgccctctgcctcagggtaagagaacagctgccctcagcttattctcccccaaagctatgcagagccttctgacctttcagaaggtttgcaccctttccctgtaatttctcccaccactctgactgatctcctgcaatgtttaactggtgttatattctaagcttaatcgattgcacacttaaaatgttcagaaaacactcaggatagtggacaagaatcatttcaagtccctgaaacctcaaagtctttagcatatactaaccttcaggtctacatactgatgtgtaattttcaatgcactgtcaataactatcaataacatcatacacacgcacacacacacacacacggccattttggatttgatttttacattgcagttacatatataaaagtgaagttatagattttaaacatttgcatatttcttaaactttctttttaaggatatatagatttgatctctcttttaccctccccaccaaataatggcccacttgacttagggcaatgggggtgtcctgtagttgtttattatgaagaagttgttctcaggcctggagacatgattagaaccagctggggaaattgcttttgagtagcagtgactgagttttactcaggggatgcagctttaattgatctgtgcagtcccctcatcccatctttttataagctccccaggtgactataatgcgcggccaaggctgggaaccactgcattggaaaatgcagaatttatctctttaattcagacaaacatatgaaatgtggaccttgtgtattaacatgaagcctggaagactgctagaaaactcttcgacctcctgctttagctttgtttcccctttgcactcaagcagaattaattacttcctacctaataacgtagtcatgcctcttttattttacttatcatgtagaattataattattttttcagtgcctgtctctccagttagacagttggtttccgaggccgagatcatgtcttgtttatgtgaaatagcctcagcttttaacacaattctggcacatagtagttgctcaataggtatcctagaaagggaaggtgagcataaatcagaaaaaagatataaagtgtagtttagtattaactgaaaataatttcttcttggataagcactcacttctaactacaggaaatgtaatgtagacaaatttgtattttcttgtattctgatcttcgtcagaaataatggcagctatcaatttttttatttaaagaatttaacccagcatctcatttcgggaaataaagcaacatatattgaggtagggattgctaacaagtgaatggctagttctgttaagccataataaaattgaaataatatcagcctgggacttttctctacatttcctatgtcagaacatttgcagtaactgttgctatcaatggatcatactcttgaccagctgggattgtctgagtttccacacacaaagagatggatgggatgctattagttagtctctttagacctgaattcaattttgattgaacatgtttatacttgtgagcttataattatccttgagttcattttaagagatggttttaaagatttcttttttcccttctcactaactactgctgtgttttcagagagatttactagcataaaagatttctggggacattcataaaagggaagaaaatccatagtttagtctgagtctaaaagcataaaccagaggggatgccaggcatctttctactgagtagcttccccgttgatcaatgttaggaagcttgctaatgacactctcatccagaacttttggagagtagggagaaactaacaaaataacagagagccgaggaattccacttttactaatcattcattttgaataatctcacttatttactcagtaaatatatgttgcttgcttaccatatatttatttcagtaagtatatgtcgcttgctgggtcctggtaatgacagtggtgagtttccttcccttgttagtgggatctacagccacctataacttaagattctcccccacacagcccagacatacacacaacgctaagatctgaatgcctgtgcccccaaaaattcataagttgaaatcctaacccccaaggtgatgtgaaaaatgtaccaaaccctgtccagaattttggaatcgcctcccagatactttatctagagactctttgttctacttccccacaagtttttcattccagtatttaatcattgagtgtttctgcttgtgatacttgttgcaaagtcaatgatagtcaaagaagttcaaaaattggttactttggacttaacaagcaaatgcacttctaggtggcttttgaaaaccaaaagtacacctaagtagagagcttctgttttttatagtgattatatgaagagtaatgggtgaaaagcatcaaagctggaattggagctctggggtctacaccgtttccaatgaatcattcctaatgtgatgctttcatccatgctcttggctctgtctgggatgtctcctctccgccaggccctgatttcagtcatccaggccgagtttaattatgtataactgtcttcgtttatttggggcactaaaacaaaaataacaaaaatactatagactgggtgtcctaaacaccaaaagtttattactcacagttctgcaggccgggaataccaagattaggttatctgcagattctctggtgaggacctgcttcttagttcacagacagcatcttcttgctgtgcccttccatggtataaggggtaagagagctccctgagatctcttttagaagggcactaatcctattcatgagggctccactctcacagcctaatgacctcccaaagggcccagctccaaacaccatcacgacaacatatgaatttgtgggagatataaacattcagcctatagccataaccagatgtttttgcaaccaagatggtgaattcttcctgagcacgtgccagtcagactccaggagagcagggatcccatgcacttatgtacttccatccatctcacagcctccatcgctttcagaaggttgagctgcccccaggtaccaaagcaaggactggaatatagctgagagatagaaatgttttgcaaaatgttgcttacagattcagaacttaaactgatttcgatctcttgggaaagaaatatgaattctaatctgatttcaatctctctggaacaaaaaaccttttgtatctatctttcttcaatgatgggaaaaagtaaaataccttccaagcctccactaatccttctactgatgtcttctatattcgtgattcagatgtgccttgtagacaagcacagatcttcactgctcacttctgccataaatgcttcacaaattaaaaaaaaaaaaatggtaagcctccgttagacagaaagaaaatgattcttttcactgtgtttaagaggactgattagggcatttcttcagtagtaccaatgtctaccatatgcttcttcctaaacttatataaaaataaatttctgacaaaaatatgtaaaatctaaacatgtctaactaattctcactgcatttctatgcttttcatggaaagagaaaataacgatgaaacttaagagtattgaaatatttatttttcaaaagtaatctactttattaatattatttgcttcttttttcatggttgtaggttcattgcattgcttttttcttacagacattttgataattgttgattttcataagtttgatagaagaatgccattaatacttctcatttatttttcattatctgttcacattaaaataaattctctcttgtaattttcttatgtatacaaataattggaatatttatgtaagattttgtgttttttttttagttttagagtatgaggttattataagggaactgttgtagattaaacttttttaattatactttaagttctgggatacatatgcagaacgtgcaggtttgttacctaagtatacatgtggcatggtggttttctgcacccatccacccattatctaggttttaagccccacatgcattaggtatttgtcccaatgctctccctccccttgccccccaccctccgacaggccccagtgtgtgatgttccccgtgtccatgtgttcttattgttcaactcccccttatgagtgagaacatgcggtgtttggttttctgttcctgtgagattaaatatttcatgatgaaaggagcaaagtgctgtgtctacatgtgaaaaatcaagtttaattcaatctagatggatgaaatacctggaatatccaagtaattctagtaaaattcgttgtttgattattttattcctcccactaccgtatcgtgtgtgtgtgtgtgtgtgtgtgtgtgtgtgtgtgtgtgtgtgtgtaatgttgctcagaaaatatagataaatacttccattctccatcacaatttattgttttgggtgatgcatatcaatgaggttatgattattcacacacaattttcagaatatacaattttatatcctatgtgctgtgtttgttctctgcagctgggaaactgacctggtgagaagaaaaataggtagcccttaaaatctattttagaacaaaagttattttaagatagatgttacggactgaatgtttgtgtacccttaacattcttatattaaaatcttgcctccctactgtggtagtatcaggaagtgaggcctttgggaggtaattaggattggaagagttcatgagcgtggggtcctcacgattgggattagtgcctctagagtcatgagagagcttgcttcccctctctgctctccaccatgtgaggatacaataagagtcacagtctatacacagaagagggctctcaccaggactcaaccatgtaggcaccgtcatctcagacttccagcctccagaactgtggaaaatgagtttctgttgtttctaagtcacccagtttatggtattttattatagcaacccaaattgactaagaaagttagactagtctggaaatgggaccgccttcacctttcccaagtgaaaagtcaaatttcaaccccacccctattattcactccatccagccttcactgagtacttacattgtgctggggactagggacacaagaactgataagacaggaccctgctcattgtcctctgctcattcccctccaaaaaagtctaggatctgaatgcatgccagtctccacctcatccagtgtataaatctattccaaccctgtggttatgtcactgtgctgagagtgcattgtgctatgtcttgaagacgtctgtcttgtacgttttaaaacatgtcaaggttattataaaataaatgcatcaaagcaatacttttgccagctttcaacttatgaatatggattggctttaataactagattaggacactacttcagaagccatttatctaatgtatttttccaaatgttatttcatcaaaaaatttcctggaaatgaacaagatatattgaggccaagatgccacctaaaaaatattcccttttggtggggcatggtcactcacgcctgtaatcccaacagtttgggaggctgaggtgggtggatggctttagcccagagtttgagaccagcctgggcaacatggtgaggtaagactccatctctacaaaaataaataaataaatacaaaaattagccaggcatggtggtgcttgcctgtagtcccagatactcaggaggctaaggtgaaaggatcatttgacctgggaagtggaggtttacagtgagctgagatcatgccactgcactccagtcagggctatagagcaagattctgtcaaaaacaaagaaggaaggaaggaaggaagaaaggaaggaaagtattctatttcaggaaaatagcaaactaaatttcactaatttttgttatttttgctctttattttctagtattttttggaatgtaactggataagttaaatgaaatgagtaatgtaatttgatggaagtatgtagttattttcagatgaataaaggaattaggacttgggtcttggtttccaaaaagagaaaattaaagggtaaaactacataaatcattagctccggaagtaaaggaatttatttttcaaagttgaaagagaggattaaagaagaggaaattaaattgaaggataaagaaagaaaatttaaacctatagaactcctaccaagtgctggcctgaagctaaattccaagttctatgctgtatttcattaaccctcacaacaacctaatgaggtagggataataattcgcatttacaaggagtaaacaaccagtcagtggccaagccagggttcaaaggtagatttcctgaaggaaaccatttggaatcagcgatctagagactaagaagggggaagaagccttttgcactggaatgagtaaggaatgggaaaggagataaagagactagcacaggcagtgctgaacatgaccagttgagagcaaggaaaggagagatttcaaagcagttaagaggaagtcctgctagaagtagacagagcaaaatccaatactgggtcctggatggcgaggaaggtatccttctaaccaaatgaatgaaaacgtagcaaatgcagacaagttcaaggaaggaggggaagactgggaggaagacatttagagactctgaaatagtctctaattgctttgcaaagtaagggatgagatcaccatgtgagtgagggaggatgttaatgggacttcaagaataaagaaaaagatttgacaaaactgagaggcctaactacagacagcttggttaaggattgcatgtacacataggaatgagtttcagtgtgcaagtctgacagggtaggttcacctgagttacgaatggggaatgtgtcagtggggaggcagaactggtgatgtggagagaggagaaaagggtcaagaacgtgtgttcatgcgcgcacgtgtgtgtgtgcgtgtgcatgtgcgtgtgcctgtgcatgtagaagaagatcataagtgagtgtgggtgggtgaaaaaagtgtttaagtggatcagtctaaggagggaccaggaaggggaatggggaataggagcaggaaaggcagaaaagtaagcttgagaactcccaaaccgttttgtttgtaatttgttagtacagtataataatactaaataatagatttgtaattctaagttgtaagacaaagaaaatatgctcgttaaaaaaaaatcttaaatttgatagcaagttagggattgatttctgaaaaacagcccccaaagcacaaacagtaagagaaaagatggatgcatttgattacttttactaatttatttttaattttattaattaataaattaatgtattggttttttaatttaaccaatttgattaattgattaattttaagttaaaatgcaatgtttctgagataaaaagcaaacacacaagccacagtaggaggaaataattataacacatacaaacaagagtagcataaagcacacctaaaaaaaaaattaaagaaaagacaaacgatccattgcaaaaaaatatgcaataacctgaagaggcatttcacagaagaagaaacatgaatagctaataaacatctgaaaagattatcaacctcattagtaatcagagcaatgcaaattcaaagcaaaattaaatatcactttacactcaccagattggcaaaaattttagtctgaaaatataagtactactgaagacgaagagcagcaggagctcttatatgctgtcgataggagtataaattggtcccaatcccttggaaaacaatttggaattaccttgtagttgaacatttgcttacctttctacctaacaattctactcctagatatttccctagagaagcactagtacaggtgtgtgaatgtttacagaggtaatgtttgcaaaaggaaaaggaaaactggaatcatctcaaatatccattgacagaagggtggctaaataaattgttatgaatgcataaatggattttactatggtagtaaaaaaatgaatgaactgcagccataagcattaacagagatggatctcacaaacaaaatattgaatgaaaaagacaaatcacaggaatacatacaaaatgatgccgtttatgtaaaggtgaaaaactcacaaaaccaaatattttgttcatggacacgtacatgcacagtaaaatgacgttgaaaaatattgaataatccaaaaactaaaataacagttactcctgccagggagaaagaggattggaatgtgtctgaatggacaatgctctgtctgttttatttactcatttttaaatttttttagagatgaagtctcactctgtcacccaggctagagtgcagtggcacaatcacagctcactacagcctggaactcctgagctcaggcagtccttccacctcagtcccctgattagctgggactacaggcacagctaatgctctatttcttaagcttggtcgtttattattctatgggcctatgaacacattacctatagtccttcatatatatgaaatatttcataataaatgcaaatcaaggcaaaaattaaaaggggaatgaaaagccaagtatatagaagaaaatttggtgttggtctaaaacataacacatttagtttaaatatataaatcttgtgaccttcactctgaactacatacagaattggctgggccttgcaaagtcgcagtcctttgaaagaatggttgaatatttgaaaaatgggaaaaaaaataaagttagtgtttcatttttaataggtaagaagtactttattataatgaatctgtcagtttaacctctgtacataaagaacacaagattaccaaaacaatgcagttatctctagaatatgttctgtgaaacaccagacgttaaaggttctgtaatcaaatgtgttcaggaatgcaagatactataccccctcttagaaattcgtaagtaagcacctaatatggctgctagattattttttccatcttgaaaattcaaatattaatgaaaacttaagtattctctatgagagatgtagagaatctataaatgaaatctcttgcaaggtctaagaaaatcctgcctcaaatgacatctctgacaatgttcatctcattctttggctcttttccctctgctcacacctcaaatgttagtgttccttaggctcattcctgttcctcttctcttctcaatctctttgcctcctctgcaatctataatctgatcatttcaagatctctctattcagacctcacttttccagactcatactctaaattcatattggaatttctcaagctatgatcccacagacatttcagatttaacacatccaaaccagactctgttacttcacatcctaaaataacttggtctctggattctccattttcatcatggtgtcaccatcccgtcttgttttcaaattagaaatcactttaattggactcttgcatcttcttgcatttattttgccatttttcaggagtgttccttggcttgaggattagagatctttattttctctaatcctttgtcacatcttagtttccagctttattttgtcttaattgggtcattctgtcaccaatatttcccatatgcagttcataattcacatagtattaacataagcatctaatcatgttatttcttgttaacatgaaataacatgttctgttatttttcctgtatggagagcctccagagactctatacaggtgatagacagcctgttaaggtgatagacagtacaacgtgttaggttatacatggagggccaacagatttttggtagtttagaaaaggaagtgaccatcagatgttgatagaagatgatatttctgagtattaacgtatgagtaggagtttgcttgttggatgaagagggacagagacagctacggagtcttgacaatttctctttgtctctgcttctgaactagtggtgaattgactacagaaagtcttgattatcataagggccagtactgtcataaccctaaactttgtgtacaatagaaaaagatgattctgcaaaagaaactatcatcagagcaaacagacaacctacaaaatgggagaaattttttgcaatctttctatctgacaaaggtctaatatccagagtctacaaggaacttaaacaaatttacaagaaaaaaaaacaaacaaccccattaaaaagtgagcaaagggctgggcacagtggctcactcctgtaatctcagcactttcagaggccaaggcgggtggatcacctgaagtcaggagttcaagaccagcctggccaacatggcgaaaccccgttactactaaaaatacaaaagttagctgggtgtggtgatggacgcctgtaattccagctacttaggaggctgaggcaggagaatcacttgaacccaagtggcagaggttgcagtgagccgagattgtgccactgcactccatcctgggtaatagagggagactccataaaaaaaaaaaaaaaaaaaaaaaaaaaaggatgggcaaaggacatgaacagacatttctcaaaagaagacttttatgtggccaaaaaccatgtaaaaaacagttcaacatcactgatcattaagagaaatgcaaattaaaaccacaatgagataccactatctcatgccagtcagagtggcaattattaaaacatcaagaaacaacagatgctagtgaggctgtggagaaataggaacgcttttacactcttgttgggaatgtaacttagttcaaccattgtggaagacagtggggtgattcctcaaagacctagaaccagaaaagccatttgacccagcaatcccattactgggtatatacccaaataaatataaattattctttataaagatagaggcatgcatatgttcattgcagcaccattcacaatagcaaagacatgaagtcaactcaaatgcccatcaatgacagactggataaagaatatatggtacatatacaacatggaatagtatgaagccataacaaggaatgagatcatgtcccttgcagggacatgaatggagctggaagccattatcctcagcaaactaatgcaggaacagaaaagcaaataccacatgttctcacttataagtgggagctgaacaatgaggacatggacacagggagggaaacaacccatactgggtcctgtcagagggtggagggggaggagggagagcatcagcagaaatagctaacacatgctgggcttaatacctaggtgatgggttagtaggtatagtaaacccccatggcacacatttacctatgtaacaaacctgcatgtcctgcacatgtaccccagagcttaaaataaaatgaaaagagtgaaaaaaaaaagaaaaaaagaaaaggaggtccttctaggtgaggtattactaaaaggcaactgaaagaaaaaaatgtttctctatacttaacaacaattctggacaccaaatgtgtgggtttttttttttttttttcatgccgaccgattctccaacaccagctgggtctcctacaacccaccacagttctgacactagctacccagagttagcatagaccacacaggtaaaggcctcagtcccataagactgccctacacttcaaatgccagttgcagacctgggcctctcataatttctgaccaaccaacaataaatcaggggtgcttactacttcctccttgggttggataatttgctagaatggctcacagcacttaggaaagcagtttattcaccattgctggtttactataaaggatacaactcaggaacagccaaatggaagagatccaagggcaaaggatgtgagaacgggagctgtatgccctctccgggtccaccacccttccaaaactttcacatgttcaccaacccagaagttcttggaacaccattgtttagaggttttatggtggttccattatgtaggtagaatttattaaattaatggccattgatggttgagctcaatcttgagcttctctcctatccccttacactggggatgaggctgaaagttccaatactgtaatcatataattggttcccctggcaactagccctatcctgaagctgtctagggagcccatccactaggcattcatattactctggagattccaagggtcttcgaagtgcttgtatcagaaactagggactaaggccaaatattgtaacaaaagatgttcctatcgtccctatcactcaggaaattacaagaattttaggacctctctgccggggatttgggacaaagatcaaatgtttatttcttagtacatcacaatatcatagtatttcttcctctgggttgatggagacagaaccaaagtgcaagtcttatacaaacaggatttcaggccacacacacttccagtctctacccaccccgtagcccagtacctgtgtgtaggggacacgctacacagccataatctgcagctctgattctgactcagcagtcctgtacattatatggccccatgattgccccaaccaaatgtagcatttgcagctcttatcttttgcagctatactatctttggcagccagcctgctgctaggtgacagtttcttttaaactactgagatgagccaatcagtccacacaaacggaagttttcataggcctgtgacagactccaactaaaatgtggttttctacccaaagctttagtgtcctgcctcatatgaagtacaatttcattacaaaatagcaagtgcttcccaagccaatgaggtatctctaagtacatggacctgaggcatgaacatgctgatgtgaatgtaaacaacagtcacacataaaataaattagtcagtgtgcaatgaatttagaaaatacttcaaataaatagaggagactaaatggtatttattcatttaatcaacaaatatttattgagcctctattatatgacaagtattaccctagatactgggaaaacagagattaaccaaataaacaacactcatgaaatttgcagtctaacgggaggagaaagacaacaaatttaaaaatctctactatgttgagtggtgataaatgttgtggataaaagtaaagttggatgagaagactagggaatgccctggtgaggcatgagggcatttgatacttgatataggatcgtcaagagagaaccctctcagaaggagctgttgtcaggggaagatcaaaagccctgagctggaaatgtgtgtgtgtgtgtgtgtgtgtgtgtgtgtgtgtgtgtgtgtgtgtgtacctggcccacttctttttccttcagtgtttgtctttttataacctgtttaaaagagcaatttttatattaaaaaattaaccctttgaattccgtttatgttaccaacgttttcccctcacttcgtcagtgtatttctcttttgtgatatttttgcaccagtggaatttttatcagaattgcactcaaatatattaattatttgggaagaatttacatgtctgcagccttcagtcctcccatttagtaaaactggtggtccagtcttaaaagtaccacaaatttttattaagatgattctttggtttttaaaactatttttgctgttattatgaatgtaggattattttggtccattgtactttctaactgttgtttctggttataagagaaaattattagtttttggagcacagtggctcacacctgtaatcccagcacttgagaaaactatttgtttttaaatgtgtatgtttttgtcttcagccattttctcaaactcccttattcgaatagtttttagtttctttccactatttataaacaattatttcatctaggtataatatttctgtttcttctcatcattaacattttatgtcttaattctactcactaaaatttccaggaccttaatgaaaaaaagataacagtatactcacttttcttgttcttgattttaataacatatatcgctagtatttttacaattacttgtgatgccagcctttagtttaacagaggtgttttttattaggtgttaaagaaatatccctttagtcatagatttaaacattcttatttggagtggatattgcattttgtcaaattctttttggtatctgtcaaagaaatgataagttgtttcttctttaaatggctaataccataaattaatttaatatagggtctattaagatgttttttagagaacactttttccacaggctggtccatgaaaaaaattgggggtggggagattattgtctgatcaaatcatttggaggaaatgctacatagtatattttcttcttaaagattaattagctcattagcatattaaagatactgagaagtccagtagtgaagaattccattaactttgttaaacccttcatttccaaatattacctgtcccccctccttcatatagcattaattagcaccccccttgacttgggttcaatctaacacacttgagaagtgttatattaatagctttccttgtattaaatcatccttgcactcctggaatagaaacgccttggccatagagtgtggctttttaatctagtgctaagagtgctaagttggttaggttttaactgaggatttttgagtctgtaattataagtgggatgtactgtcatttttttgtctctgccttcttttggctgtttctcttattttagtatcagtgtgattctggattggtgatatgtattgggaaatgatccatatttttctgggctctggaacaatttatgctgcatggggaattatcataggattttattttcttaatttgaaatattttctacaaaatagccaaaagagaaatgaacccaaacacagtgctaactggttgtcagtgagcttgtaattaaatcccctgttagctttattttctttactgatgaggcttcaaatgtcttcatttttcctctttgtgggtaaacatgattgctctttgccccaaacggttgacggttcagacagcctaccctgcttagaagcaatcattccttgctcttgtcactccagttcactgcagaacagggaagcatcaaagttaggtcagggaagcaggaaatgatagaatcccaggcaggagaaccaaacttctccatgagtatgttgtccctgaggctgggaacaaagtggggtgacaagtatgaaggcctggagggagggaggcaacagaggcaggtgaattgtgaggtctagaatcccaagaagaggtgaaagagtatcgatcctgttttaaaaacactttctttgaggccgtgttgagagaatgttggacatttacagtctgtaagtggcgacagggagtgctaggtccacttctgaggccagttcctccccaagtcacagaactctttattcagagagatgcaatattattatagtcaaaatacttcacacaattaagggtttaggcatgaaaacacataaaaatggatatataccttctttcctggtatggggattactccacattaaaaagcgaaataccttagccatgcattccagcctcatagcaggcgcccagctacgtgctaggtatttgtgactaagtacctggtgtttgttcaataaagatgtgtgttgtctttccttgtttttatgcaatagatgtgtttctaaaaggtggggcatacattaaaattagagaattaatctttttttccaggtgaggtatatatatatatatacacacacacatatatccttaggcactaaatgtgtctgctttttaatccatctttagttagtgtttctgagcatgggaactttttaacctctccttatcctggtactcttaaggtataataatggtctcagatacttcaatatattaaattttaaaaattattatattaatattcaaaataatttttttctaaataagttgataagttgccagtgttctctatttgtttcttcatatgctgggtagcttgcacctccatctaaaatacaaattgcacataatacaattctttaaccaaatatcggttgtgtttcttttgagacaaaaaaagaaactgctaagattacatgtctctgagttattctctgtaatgtgatgaatgccaaaaacaagaaacatgtatagtagaggaaaatagtggtgatcaacagcaaagtggttccctccactcttctccatacccctctcctcccttcagagaagcacattcatctaagtgaattgttgggaaaaacttatagtccattcctccatccaaggatccctctacgttgcaggcatatgtttaacatgcttattaaatgctattttttctctagtaatgtacagcaaaaaataataataatcaaaggaaaattttggtggtctgttgcaatatgaaatcaggatttgaatgcctgtaatattataaccaacactgagttctttgaagttccttgattctcacaaagctaaaaatcattccttacccttgattagagaaaaatctgattttcctgttgcattgccttcttgaaagagatgatatgagaaagtgccacgatgaattgttgaggttaaatcagacgatattgattttgtgtctaacccagctgtactttctcagttccaacacctcacagggaaatacatacaggccattccacagtaaagacacctgcgacttgataaaattattgggtaaggacatgggaaaacatatttttctccatagccatgcttgcatgtttttctttttttatttttattttacccctttccctgcctcccctttttgtgattgtatagaatatgccaacattttgaagggacatcttgggaggtgaggccggttccctgggaccagattctctgttatcgtgagccaggtcaccatttcattcccctctgttaacagtgactgtagagtccacagatgttccacagtgggtggaggtaataatctgaggcctgtacccaagccaccttgtggcccaggttttaaagttgtgtgggaagcaaagaaacagatgcaaaagacaacatgcagaaagagtgaacacaactcagtgactaatggggcatgcaggatcaggaagagctaaaagtcaaatgacattcatatcctggagaatgaggtgcccccatcaagttaatccattaattaatcaaacattcaggacctggagccattcactctctaacatattctttggctgtattaatatggccattaattcctgaacaacaagcagaaggaaacagtacttaaaaccatggttgagagcacttagtttttcttctctgacgatgtgcaaatcggcagttgcacttttaaaaaaagcctttcatataaatctgggcaccatcctgaatgcatcagtcctattaacagcatgctagttttggagaattgctacaaacccagcctgaggtgaatggcagctgctcttctctggtcagggctacttaaagaagtggcaagtccaaagccatttagaaactgaaaagtggccttctgataaataaaacgacacttctgaagctgaacatcaaggaaagaactttgtgctgacggagaactacagaagctttcctatgggaggctggcatgcagatgtcaccgtggggctttgttgattatgaaactggaagccatagcagtaagtgggtgcatgggggcaaccaaaagcaggaggatggccttgcctgtgtctgtaagacgacttgagacagtagctgccaacagagtcccttaggtgtgtgctttataactgcaggatggtacaaatgacactcttaattttctgagagtttgctttgcagtgaagatttaagacactgagattaatttagttaaattgatatttcccctcgtgatttcagggattaaacagtaaataagcctcttgatgttgatctatctcctggggggtccaataaattacagaaacacttcttgccattttttggagcttcctcttcatttattctccttcctgtggcatactgtgtatggccaggcctttgctacaatttgttatttataaaaagtacagagcacatttcaatcctaccagataaagtcagaattctaactgagctatgggtcaactaactagaaaaaggagtttaagacccaactctggatgtaaatgatgacatggctgtctgtgagggatatggtttggatttgtatccctgcccaaatctcatgtcaaattgtaatccccagtgttggaggaggggcctggtgggaggtgaccggatcatggggacagacatcccccttgctgttctccggacagtgagtgagttctcacaagacctggttgtttaaaagtgtgtagcccctcttccttttctctcttcttcctgctctggccacgtaagacgtgcctccttcctctttgacttccgtcatgattgtgggtttcctgaggcctctccagcaatgcttcctgggtagcccatggaaccatgagccaactaaacctcttttctttgtggattggccagtctcaagtagttctttgtagcaatgtgagaatggactaatacagtaaggcttatggaacttcaagtggtgatttgggttggattcctgacatctccttggtatatccttagacacatcatggagtctctctgttacatcatcgttgagaaaacatcagcaaaatgcttaaaatgttttgggaaaaaatatgttggcagagtcttacttaggaacaggctgcattccaaaattattcaactaatttggacaaattgagtgtctactatgtgccagacatagttgacttcgatagatggggcacctttgccaaaaagtagccctttactggcaagtttccagttagtttgcaagtcagctgtgtataaattgggatacattttcctaaagagacaaattttgaaacagtggttagattctcaggccaattctcagaagctaagttaattcataatgaagtggaactcaacttctaatggaattctcaaacctaactaccatttacacagtgatttttaaccctttgctgcataccacattataacgacctaggaattctttaaaaatttaataaataccaaccaggtgcggtggctcacgcctgtaatcccagcactttgggaggccgaggcgggcagatcacgaggtcaggagatggagaccatcctggctaacacagtgaaaccccgcctctactaacaatacaaaaaattagccgggcgtggtggcgggcgcctgtagtcccagctactcggcaggctgaggcaggagaatggtgtgaacttgggagacggagcttgcagtgagcagagatggcgccactgcgctccagcctgggtgacagagcgagactccatctcaaaaaaaaaaaaaaaaaaaaaaaaaaaaaaaaaaaattaataaataccaatacgcaaactatgcccacaggacaataaaatcagaatctattaccggtagcaatggtggaaaatggaccttaggaaagaatagagaggaatgggaagcaatgcctctagggagatcagggctgtgactggggggtaggggctagggttccagggggtgcagggtgtcgtctggggtattgtggcattggtggctagaataacaagagaagatgcttctggaaatagtagtaagactgtgggcttgtaccctataggagatttttgtcttttgacagtaaatcatttttcaggagtacgaagatgatgcagggggctagaatattcagctccagaagcacaaggattggtgcttcaatgataaggagggagctgataagaacctaagtggtcaacatcactcatcagtttccttttgtccagttcatgaggaatgaaagaagctaccttcaatccaccttcttattttggggtgaagctttcacaaaatgccatgcctcatgtttctcctctgaatatgtagttctttttatcatcttggcctgattacaggcccttaagactcagcagagctaaggggaagggaagggaattgagggaaccaccaagagagctccaaaaacaagagttggcaggtaattctgttcatccacgcctgctctgtaacagctttcagagttcagctcttactttcagtcacttccttgcaacccttgcagtcagaatttcagggttcagaaacataggcctaaagtgttatcaccaagtggtgaaagcaagtttgctgggtggaggatctcctcggctattttgccaagttcttctcatttttatagctgggcatgaagatttccttttttgacattctgtgactgttacaatgtaggaaaatctgtggagatacaacattttcatatttcaagtagctgctctcaaataagggacattttctaagttctactgtttatttttccctggaattttctaggatatattgctttagctctgttttctagttttctctttatgacattttggcttctcccggtcaacaaaaatactgcactggaagaattccagagacatgtgaaagttatctgtcctgcttgagggaaagaaattactactgttttcttccctctgagagagatggcccttaaaagtgttggaatgtatctcttttcttgacattttctgatgttcctgattctgttttcctggtgagggcaaaataaattattgtgaaaaaaaggaggtgaggccctggttctacaggtttctagaggttctggtatggggagggtgtgcacagaagaacttcttccaggtactgatttactgtaagcaacaaacaaacagatcttttttctcatagattgccagccgaactgtgtagcaacactatggaaaagaccccaaccacttccacaaaagaaattcttcccttcactaagtgaggagtttaactcagttagaaaatctggatggacctcaaaggaagaattttctcctttcaaactcaacccatttcaataatagagagaaaaacagatttttttagaactgaaattccttagcaaaatttaattggaatagcattctaccttaatgggcaatcagcttatttagtaggtgagactccattaattttgactgttcaaggagatttcataaccaagtcacttaacttcaagtattctgatggagcagatagctccccatttaggaattttcttgtgctggagtaggaaaatgagagcagcgcctgccttgatatgttgatgatacccttttatttggcaaaggtattattcataaggtagtcaattaatgtcagcctattggaaaaatgacaggctttaaagcttcctctttagattagagactctaaaattctaaatgcctgcagatccatatgtcagttgttgcttctgacctttcctaattgaattagcctccttctagtgagcctgatttaaaaaaaaaattaatagatggggttgctgggggtatcacttagattttcctattgaaaataaatattcccctccaagtagtttatttccggaagtattaagccaaagtcagaaaagtggcaatagcttcaaatagacaggaagtggctgtaaaattagcctttcttaacgagaaggtcagagctgctttatatttttttaaatttcacttttatgtgtggctcattgcttaggctctggctgaggctcatttaacaatgatcccagcagtactggagccctaagcaacaagacttggagacctatcctccttccctggggtgaaatcacctcaaatcattcttaaatacttgttaaaattttcagttgcttaaaagttattttaaatgtaaattttcattttgaaagcaaacagggactcagaaatgatttttgtcagaataagtttgggtctgattctctcctataaccatttctaaaggaaaagcttggtttaattcaatctccagttaagtcaaaaacctaaagaaaagtgagtcatttcatttctcctctaaaaactaaagtgtcaggaaaagttcttttatctgtttcaatatattccaacctgttacaatctttttttttttaagtcataggaaagtatacgaagaaggaatggctgataggtgaactaaaagagaaagccaaaatctttaattacctttatcaggttagcagggaaacaggcacctatgccttaggtagaaaaaggtgattagcattcagaatactgaagcccacatcaattcagaaagggcatgattttaagataagttgaagggtaagttaggaagaagcaactttttaaagcttaagtataaaactaggatgagatcaaagatggattgttaataagagtcaaggattagttggaagtaaagtccctaatcatacccagagtatttaatagactcaattgtgttaaagaagatcttagaggtcatccaatccaacttcgatctttgattgcaaggaacagatgtctcctccagctgacactagccaaagatgggaatttatttaaaagttatataaactaagcactgaaagaaagccaggcctaaagaatgaaggagattccagaatttgatctttatttcaggacctatctctttatttctttgaaaattaatgcatatatcctcagcagcagcataaagctattgtttgtacatgactatggctgaagttctaaaatgtgttttgaatcgtgaaattacaagcacagatctacaaaatggtgatagtgtctctatactaaaaatacaactgcacattttcaatttctctaaaatgaactatgttactatgtaattgcaattacagaactgctgttaatgatgaaagaccctacgcctacctagaccaatcctcttattctaccattagagaaactgtagcctgggaagaagtgatatgttcataatttcccagaggtttaatagtagagccagtagaagaatggagatcctttgatggctgctgtatcagacatgatgctttgtgccacactgggagcagtggccaagaaagaacttagttaagaacctgagttctctagtgtcagactgtcctcgggcaagtactttatacctttctgagccttcatctgtgtaatatggatattagtactccccacaggatggggttgttgtgaggattaaatgagacaacaaatgcacagttattaacacaatgtctagtacatataaatgctctaaaaacaatacaattatcaatcgaaaaatattagctttttgctgcataacaaacaatcctgaaactgaatgatttgcaaaaatatttttatttcctacttataaatctgtgatcagctataactctgctaagcttagctggccgtggctccagttttgggctcatgttgatcccataagtttcctcatcccagatccaggctgaaggaacaacccctaccttggatgcgttgttctcacgataaagaggaatataagaaatgggaaccatgtgatgcttcttaaaacctctactggacaccatcacaatgttgactcttcgcatattatacctatcacagcaagtcatttggccaagcccaaattcaatgaggcagaaaagttaattgcatccacaggcaagctatgttctaggatggaatgaacaatataatctagcacagaaaggttgcgagaaaatctgtggtcactgacacaagaagcttgaataatctgaaactataaactgcataggccatctgtagtagctcaagtcttcaaaattatggactgttaagaaaaaaatcagagatctagggaaggcaacaaagttattttgggtacagacaggataagagggtatataataccattccttctcccagaagcttcaataggtagaggatatactgatttagaggtcatttatttcagtgtttccaaacctgaaaggtatttcaaagggttcatattcttaaagcagcagtggtatgtgtttgcatttccactaattttttaaaagctcaatacatttaacgtttatgtaaaaactgtttccattataaatggaacacatcgagaacccccaggtgtatatggaggaagcctacttggtggtaagtggagattagatgactttgctcgtgatttgtaacttagtttataacacagatgagcactactaggtgcatcctttatcatcatacatttttaattgttttattcttagtcatatgttgtttacatttcattctcaactctgaattaatgaggaatttaatgaaggagaaaaacataattctgtcaattttcttctggatacttttccccagatccataaatttctttcatctgagaaaataactatatgaaacatcaagatatctctaatatttcaaaacataatgtaaaaaagaaaaataaattggtgctatttatgcatcctgtctgtaaccaacaatctattgcagaaataaacactgatgatgctttgaggtctgtaccaggttaggggatagatcagaatgactgtgttcctattatttttacacctcagtacaacatcacaggccattccttctgcctgaaaagccctccttcttctccctcctctgcctaatgttccactcagccttaatccacagctcagctcttacctcctgttggagaagaaattatcctcttcaattccctcagctatatttgttgctctttccccagtattcccatagcacatgcaggggaattacctcctgaatagccttggttttgaaaatagtcactgagtctgtctttctgagttaaccctgagttgagattggggcaatttggttttccagtgcccagcaacatgcctcgcacctagaaagtactcaacacatctttcttgagtggatgagagtaaacggaattgcagcttgatatataagattgaaaactggagaggacattgaagagagcatttcaggaagaagaaaagcacacagaagtaaggagtaagaagacagaggctgagatgcgcaagtttaaggagcaataaatgagcccatgtgactagaccaaagagtttaagaaaagaagtcctggaaaaagcagtggggagtttaggtgtgttgaggagggtctcaggggacacacattgtcttggtctgccctggccatcgtatgtcaaaatatcacatagcttaaacagcagaagtttattttctcacagtttcgggagcttgaagtctaagatcagggtaccagcattacaggtttctggtgaaggctctcttcctgtcttgtagatggctgccctctggctgtgttttcacatggtgggaagagggagcactctggtgtctcttgcttttcttataaggaaactaatcttatccccgtaatctcatcatatgacaactcaccctgctaatctcatgtaaagctaattatctcccaaaggccccatcaccaaatacaaaataccaccagactggggactacggcctcaacatatgaatttgggggaacaaaattcagcccatagcatccacccatattgagtggttaaggaaccggccactgataaatgaagtggaccctaaagattgctatcatccttctgccattattggggttccattgttcagttaagaaagtgaatgaaatctagaaaatcagcatttccaattaaaaaggcgttaaagcctaaggacatgaagaaaataaccttttaatttctgagatgaatgaacaaagaaatttttctaagtggtatcttctatttctatagcagccataaatcataccattgggagctgtaccattttacttttaaatgtacgtttttgaaaagaacacagtcgtttcttattattctccttttgtacaatttcattgcattcataaccagtcaaagggtcctgatgattctccggcagaaaaactatttgttatattcacagtccaagtgcctactgattagcacaggtattttgcattagctgattgggatagaagtacagtcttcctctaagctttactgctttctccattttccattttttgttatttttcaggcctggattcctttcacttggttcattctcttaagaattaccagccacagaatgatgtttttatttatttgaaaagtttatgtccatttgcaaatgattcaagacaagactgagaattccactgcctgatttgcagaaagttgttgctgcctgaaaatgtgctgggcatgtcctgttgatagatagtacaaataaacagtgttaatacaatgggcaaacttcagagcatttccatagctcccgactattgaatgatatacaaaaatatatgacttggggacagctgaaattgtttccacactttgagctctgcttccattagactggttcacaatattagattgaatcccaaggtgctactgataatcatcagctgcttttcttgccaagaatctttgtttaaatgtattctttcattatccatgtgcttttgaaaaaaatgagggaaagaatgcttttaattgaataatctgtattctgtcaggtatttcttctccgtaggaaggtatctgaaaacttactttactttgctgtttttatttatcctgccagtgtagtatattgatgagagaactgaggtccaatagtgttaaaacaagacatgaaatattgattaattcttcttttaaattctctttttacccctgagtataacagatttcagaagctgctgccaataccatgctctccaataaacctccattattggaaggggggtcttgatacccttcaggctttgataaatgattattatgcttttgaaatgttagctttgagtgcctgaggcttgactttcatcagttcaagaaagaaacagtagaactgaagctgcaaagtttgagccaaaggcccccaaaggaaccatttcatgaaaggagttaaccatagatactgtggcttctgaactcgttgtccttgtcccacctgatactttttctgcattcctaattgtacattcccccattgcaggctaagacttgccctttgggtctaggcctactgagtttgctgatttctaaggttaaaaagtaagataatgggtttagatggacttgtaaagaagggagaaggaagtacgatgcttggttggatgaagaaaatcaggggactgtgaatgagcagagtaggaactggagattataggaatctggctgtttagggtcaaggacgccctcagagcaatcaccctaaggcaagaataggccctggggagtcaagaaatccactgccctcttaggacccagatgagcttggaacagaggggaatctgataaaatgtataagagaactgcacaggacagccactgcacaacaaagagttatcctgtccaaaatgttaatagtgctgagattgataaactctaatctagagaaagtgctacaattttttgccatcaaagtatgaatttcttgagttcagaacccaactcattgagctattggtattcaataattagcagagcatcctgtgaatagataataaatccaacataatccagttctcttttgaaaagtagccatttccatttcctcagttcctcccctgaaattatctgaaagggaaatgtcactcagttagaaggctccagcttgccagataatgggaggaaagtgcttcacgatatctttccagaaatgagaagaggacagagtgtgctcagaaacagaggtacaggcaaatgaaggttgctgacagccaaaaacactgagactggtaaacatcatgatagctgaacagacgaggaatccctgtatccatgtgatggcctttcgacatgaaggaataggggtaaacatcaagggtaaagtagcttatattttattgaaataaactagatgaaaggtcgtatcttaaatgatatgtcttcaagcatgtgctacatcaaggtcttgacggcatcattttcccaagagatatgccagtaaatttaagtagtttccaagttgtaagtatcttgattaccaaggagcagcagggtgcagagcctgaccggtaaaatcaaaggattgatggcttcctcttcacacgcctgcctttattttcccctgcatggcccattattctgctgcattaatttaagctttcctattgcacagaattaggggcttaaattctcttatcatccctgtgggaatcttgattgtttatttgtggatgagaataattgtttttattgatccccaaatgtggaaggtaaaaaaaaatgctatggttgatggccagctgatacatagttagtgctgcgtgcatgagtgacaaattatgagacagtatttggccccagaggatatcctttaagaatttttaaggcatttgatagttatcactttaaggcatttgatagttatcactaagtctttccaagctggaaatcataaacaatttcacatacatcaggtaaagtctttttgttgtagttttcattgaaacttaaaggtctagttgtgtgtaatttataatttctcatttccagtatgctcacacagcaactcggtagagtttggaaatggtacggctacaagacattctggagccagtgctatcaggccagtgagttcctctagggacccagattactaggcatttatttggaagaattcctggattcatccagaagttgtcattattccactgcaagcatcattgtatggacattagctccaaatagttagagaaaagaactactttgctagccctagcttgtactgtgggtaggaaaccccctgccatttaacatcccaaatatatcagaggcatcagggaaaggaactgcaactgtcaattaagtgctgtttgtaggacagggcacttgggcagtatgagcctcccccatctgaatcaaatgcaacacatcttgtttaaagagctattgagctaattagcatggcatgtctacacagaaataaaacaaatcaggttaggtcctaaaggaatcaagtatcagaaatgtggtaaagtttccttattaggtggtaagatggcaagatccttgaccagatgccaaaccctgaaattcttgatcttcttttcctgtgctaaagagaacatagatatatagagaagccactaatgaccattgtatcttctttattctttgagggctgtgttctggaagcttactgttgaaccttcagaaacgactgtgtgggctagaccagaatgagtcaggagagcttgcttgtttcacagaataagtgtccatatgtcacaaagaggatcttcctctttttcctggggatatcatattatctttgtctttgataattagcacctctgtgaagggaccacatcaaagggaggatgatttttcctaattatgatttttttttctcactcaaattcacctttacccttagcactatggttcagttatggccttggccttcgtcagccattgcaacaccttccatgagtggcagtgtaaaggagggaatcatggagttctccccacaaaagttttgtgactattgtcactaccattgcaaggtaaaaactttatacccagcttatatttttatatataccccatacatttagtgtcatgcccatcacacaagggagcatgaaatgtgatctgacgtattcacatgtttgctcattacaacatccaatatgcatagagcatggtaccgcacagtggttaaaacttaattacagactgttgagggtgatgatcacagaatcatagttcaaccatctcattttagacacaaggaaaataagacccagagaggctaaataagtggccaaagcctcatgttcgagtagcagcagagctgcaatatgaaaccagatatcctcactccaattctaactgcactctgtgttgactctgaaacacatggctgtgctttgttgcactgtattgtgatcaattgttttaacatgtgtgcctccctcactagaccatgtactcttaagaaaatattcatcaccagcttcctagcacagtcagtggcacataataggatcccaataaatgttggttgaaaaagtgaataaatgagtaaatacatgagacctgattttttcctcatcatatagaaacaaacaaatgccgtaacttttagtgatctctatgagtgcttggtcagcctgataatgaagaatagacaagatagggagtgaaaggtagaaaaaaatagtatgagaaagaagagaaaaaaaaagaatatacaattccataggaataataaccagacaaattcagtacatagacaaaatatttagattcaatttgggagcattttgtcaagactcttgcctcttctgatctcttctcattttcaaataagggctttttaagcagatggtgctttaagcaattcccatcattgctgctcctcctcaaaccccagaatgcaggattgactgcaggttaagttgtctaaaaggcaaagttgttcgttactgtagctcacttccctgagatacgtcttcccattcattttgcatctattgctgccccatgttgctgctactgtcacagaggaaagtgcatgtaactcactgtgatctagtttctgggatattttccatacaccagaagatgcgaaggaatggctacttaggtagtaacatttcagactcagtgacaagtatgcagagaggatgtatatgggctgagtctgtgtatccttgtaaatcacccaaagtcaatgcaagtaaaggctaaaaaatccaattatcaacccccactgtgagtttgtgtttttcctgaaatgctggcacattgtaagtaatttgacactaagtagtgcctgttaaaaagaagcagcagcagcagcagcaaaggattcaaggctcctaattatagcacactgatggcttggtactgggatgtgcatcaacaatattgagcatcagtagggagcaagtactggctggagggctgtatccagagagcggttatcagtatctaagtgtcagtttgaactggctgtgctcctgtaggccaagaagtctatatggaagatagaccatttaatctttttcagaggtgttgctacacagctatcaaacaaattggggtgctccaaatgcccccgtggagagttttaaggagatggacagtcatctcttttgaatggattgagtcacactggctaaagacaaatatggagatccagcttttcatttaacattcctttgaaccatttggaacttggcagatgcccaatcagcacttcatccaagtacatcaccaccttccccttcagttcctgcatttcccagctcttctttgaacataccaaccatacttccatatttgtgattttgtccttgcccttccctcttcctgaaataccttttcctcatgtggtccaagtggcttcttcctccttgaccctcccctctgtctttttcagatctttgttcccatgatcaaagaaggctttcctagccaaactttataatatagctacctccaaatccaacccactggccttcacaaagacagaaggtttggttgttttgatcgttgttgtatccccagcctccataacagtgattaccatgtagcttgttcaatggaaatacaatgaagaagttggtaacataggtcttaaaaaggaaaagtcttgtcttataatgcctggaaagcagttaagaaatcttttcagatgctttcatttcaagttattcacatacactgcatgtaagttacacttagaaacccaagcagccttcaagaaagtagtaatatgtccagttaagcaagatagcactattatcattcagttcccatctgggctccaagcaactttaagagaatctttcctctgatagacaggactaatttgtgtcttatggaaaattaaataaattatttttcacctgaagggataagattatttgacttcagatatttgctatatggcttctcttccacacaacatagctttgaggcttaaggtagtaagagcaagagcattcctataaattattcagagataattcaaaacaagtgtgcatctttgacatattgtcaagtttctcaactctttttcctgataacaagtgctatgtttttgatgaaatgttgctcgtttctcacacaccttattgttctgtgtgtgtgttctgtgttttgttctgtttgttattgtttgttttcatttccctcagagtccagtctggctcatatctcagcacagggtggtttaccttccttctggccatggacgcctgttatggcattcacgtctacgggatgataaatgacacctactgcaagtaagatcacaagaaattatttttatgcagctccaattcggagatcttgtcaaaatatcacaattcattttaataccataaatctgagaaacagataaagcaacaattatttcccagtgttctttgctgacatgacattttattgtcagtgcgtcaagttgtgacttctaggggtgagaaaaagaaaaatatttaccagtctaatgtcaaatgtcaggaggaacacttttcccttaatcagtggcatagcagggacttttggcttgaaaatacagaagaagtttagtggttgtgtaatttgcaaaagcaagtttgtcatttctgctgctctgatggcttgatggatagctatctactcaatggttagttagatttgatcatgaaggacaaaatgtcctgcagcctcagagaaactgacagcttaacaagaattcctggaaattatacttcactagtaagtgagtaatctgccagatccttatttaaaatgagtgtgtttacccacagtatatccttgctggtgggatagtttctaattagataatgaaacaaaccctccatgcttcatcaggataatggaatctatttccctaccaacaattggcacaatataattcacagactgttttaatcataatgtcaaaatggtaactctcagccacagtcttcatgaacaaatatttcttccctaactataagcataatggagctcagatgagccaatatcttactgtgaaaaatcacagtttcttcaagttctgcaagaggctatctaaagtttcttcaattatacaccatttccttttcaaaagatagccatatgtttgaatgtaattggcatgatatataaattttatttgatctattaaaccactaaaaacttggtacatcttcctaaaagctttcatacatataatagcttttaactgagttcatggacaagaatcatgtatgggtttgtgagtaaatgcatttactgggcacataatggattcttgtaaatgagtgcttcattcttcatctcaatctttctctccttttctttttttttcttttctaggacagaagggtatagaaaagtcccctaccattattatgaacaaggaagagatgagtgtgatgaatattttcttcatgaacatgccccatatgggggtcataggtttatcactgaaaagaaagtgtttgctaaatgggccaagaagcacaggataatatttacacatccaaactggacattgtcttgataatggttttcctgatcttgccgcatcacttaatgtgatccccatactgcaactgtgatgctgatgatgctaatggagatgatggtaatgataaagacaacaacaatgattatcaagttcctgtacactctcagatgtggatggtgactctgctagtaatttaaacttggcatttcatggaggatggttgtgctcatgatgttctttctggaggttcaacactacgtaccgcactttataatttaactggaattgagatgaaggccagtgacatgacaactgtgacctaagaaatgggaagattatctttcaagatagctgcctagaattgttcaacagtgagtaacttccagaagccaaaagagtttggcttcatgaggcaaggtgattgactcaatggcttgttgaatctcagcagttccgccatcttgaagaatgattgattgtcaaacactgacccaagaactgctatcagggtgcaagtatcttactacttagcctaaggatgggaaaatatctcttcctaatataccatctttctacagtatttcctacagctaaagcctcaggccattgcctaattaacaatgaagatttcatggacatcctacacttcaggattacttgactatctcaaacacataaatcaaaatgggccaagtagcaaatcttgatgaatttccactcttaccatccattcttactaccaacagtataactgaacatgtgattagaatgatctatattaatgtttagttatttttggttgagtgctaaatatttcagaaggctacttaacatgtaagataccaacttcaacactgtaataacatatactgtgaaaacattcctaaaaagtaaccaaagggtttgctaactctgcttcaacatccaacaacacaaaactatatgatttttaaaatcatgaaatagagacagcaaagcatatttttacatcaatttgtatcctatcatacttcataatatatatttgtatattcaaatttctattttataggcccaaggtgtgtttctccaaacattacattctcattgccaagtgccagctgttacacatggagaggaaatgattccttatattaaacctgaccagagctttttgccttctagggatttatttttcccatagtgtatcagttgttatgccacaataacaacaataataatgttcttaatgtccaaagtgctttgtcatttagagtcctttaacatctgttataccatgtgatgcccttgaacaccccattgggctattgtctgtgtattctgctctctttagcagatgatctgtaatttggtcattgttctgttatattccagattgctctacttgctaatatttgtatagaatagaatttatgtaaactagtaaccagttgatctctgtgccaaatacattatatcaggattacacaaaaagtatcacaaaggatggtcttggccatatgctagggcccctgtgaaaataagtagttttgagaagtttttctatatacgtatatatacacgtgtggttctatttaggtggggaaaaaatgaaaaagcagggacaacaggaggaaatgaaggcagagaaatatagtttcctttcctaggattgagacaattctatttttcatatactcgttgctcattaaatagtaaagggttgatttgctgcaagagtagctgagaattcaaaaacatccttgcagaatgattcaaaagacaaaagccaggctcaacttatagaatgttttggaaactggaagtaatgatacatttcacttcagaagcacttgtaggtctttactagtgctaagtattatggtgagctatcattaaagtgtgccatcttggataaaggccttttgcctactctcttctgcaattttgacacctcaatattcacacccataaacattactaagccccagttctatcgttggaaggagttgttattcttttgttgttcccttatgcaatttttaattctatgaatgttaagtttttttgagctaatgatagatagaaatgcccactcaaagaaaaataaacagagacaaatgttaaaattgccatacagactgtttttccccctgttgtttcactttaaaataaaaagaaatccttgattaatcagaatggcttgggacatgaacttaatttatttagtttagagggtttgtgagggctagaccattagaggaaaaaaatggttcaggcaaaataaactgcagcagaaccccaactgttaggccctctcccctgggtgttcccatcagtcctgcatggatgcatttcaaataccaactttccattctaatcttttagggcagcatgtaaccaggcctcactgagaggagaaatccaagaagagtgtagagaaacacacatgagaggaacctcacaataaaaaggaaacaaactctgggaaacatggttaagaaatatcagactcaattaataatggaggcttcaacagccttggagagatccaatacaaactaaattcaaactatatgccagtgcttctagccatatttactttttttttctttttttttttttgagatgaagtctagctctgtcactcaggctggagtgcaggggcacgatgttggctcactgcaatctctgcctcccaggttcaagcaattcttttgcctcagcctcccaagtagctgagactacaggtgtgcgccaccacacccgactaatttttgtatttttagtagagacggggcttcaccatgttggccaggctggtcttgaactcctgacctcaggtgatatgcctgcctgggcctcccaaagttctgggattatagacgtgagacacagtgcccagtccatatttacttttaattgattatgtttttttttttaaaaaaaaacttagaggaaaactctttaagaaaaacaaatcaggctaaaaactacattcttctaggtaatgaaaagtaggcaaacaacattagttttggattttttaaaaattaaaaacagcttttcttaattggttcatttgaaaaaaaatggaaacttccaatagggaaaggtagagctgagatgaagttaagggagaatgttactgaatgggaaaatatataatattttaaaaatgcaattttaaatcatgcgtaacttgtcttggagttcatcccagataagtatcagtatagtcagggatgttgacgaattctggattagaagaactgtgcaaaggtttgaaatagcagtaagctcaagtcttgggaatgcaaactggatgacattttggaatgtcctactatcgaaaaggagagaaatgaagcttaaccccatatgtcagtgtattctcataaacagctacctaaaagggcatagccaagatgcagttaaacatagctacagacacacgtgtggacctggacagctagatgcctgctttaggatatgaaaaatttcctaggtcacaattataacagtgcaatgatttctagaaaaagaagatcatttcctatcctggctcagaatgttaaaaaaaatgactttcccataacattttctaatggatcttccagtcacagtctcctatggaggcataatttatgtagtggatgacaaagagttttatgatatctggaattcatttaaaatctttagattggaaaaattgagatccaattaaaatcttaataaatgactctgtgttgcatataaatatattaaattaatatgtgtgcaggctgaaattggaaaagttatgagagtcagcatgttaattctatttctatcagggaactaactgtatgttataactctgagaattattgggtaatggggctgtttacaatgaggcaaaactgaatttaaatagcaaatattcacccatgacttgtcataactcatgaagtctccaccttgaggcatggtgaaatctcactagtgaaaggcctctgaggagagggaaggtggaccaggaagccaagaagagccctagggaggctgatgtagtgaaagggccaggtccaaggatctctccatgaaaggaagcaaaggctggcaggctgctctgtggcacccccacgtagtaggtgagatgcagcagtgagaatctttgattggaagtcattctcatgcacagaaggtggtaacagcttggttggtgagagactgatgagaagtgctgggtctttgttaaggtatgacccaggggctgagggttgaaaaatacagggtgagtgtatgtatccggtacactcagattgatagagtgtacctatcctctgcatactcacatatttaccctaggttttgtatcctagtctgtatcccggggaggattcatacttaccctaagttttcctatggctacactaagacaacagatgaaatgtgaagagtgacaaatgacagaaattgggcttctaacatactggacagctgaatgtagcagttaagatggcaaacccacaagtccctagattcaaacccctgttcccctagttaccagctggggatgataacatccatgtggatgttgtgaggatcaaatgagatactttctttaattgcaggatgctccattttgttattattatttttggaaatagaaactcttggctttaagtcacataatgttagagctggaaaattatgctacacctatggatttgactaagctgttcctgtagtttggccagttttaaaacaaaaaaatcctggcaacacactcctatcctcccagccccaacaaatctggctatctccattccctggtaggttcaaaacctgtttttatttccatccaaaagcttcccccccacccccagacatcgagtggtccatctaaaacagtgattgttaatactgttttgtaaatcttccagtccagatttattctagaacttgagtttgtttttagattgttataaatgtgcctttatttctagctgtttgacataacttttggatgttaataaaaaaaataacaccttgggaagtatggacatgggtggatagaaatgtaattgagaaagccatatccaagtagattgagggaattagtaaaggcctcatcacggcatacccaagtcataacatgttaaaagtttgctccgttggtgttcatcctcctgagacacccaaggctgatggcaattatcctattcatcttctcccacaagtctgtctttagcggaagatttttttctttacataaagagctatcatataaaaagtgctcatagtgccagaaattgaggtaaatgcaatttgcaaacattattatctcatttaattctcttgaggatagataatattagataaggtaaggattaaagagaggttaagaaacttgatcaaggacacccagcagggaagtacttagcagggctgttcactagggcctgctgtttctctttccagatgtacagactttctagagagaacgatgtgctctgcccaccctcacccctttgctctgctgttctgccagggacatgcaggagacggaggccttcctcttaaccgcaagaggccttccttttttactaatattcctcagcacagaccctttacgggtgtcgggctgggggacggtcaggtgtttctctttctccttcctgagatctttgcttccaatttggctaaggccctttccatgttatagtatcatgtatctcttattcttgtctttctcacttaactgtgagcccaccttgatgttagatattctgaaagtcattctcctatccctgaaaggtcttcaataaagatttttcctccacttagtggaaggtgaataaagtttattcttccatttagtagtggctcaataaaaaagtttgtggaatcaatcaagggatgagtaaatgaatgaaatactgaattttcctggcctatgaaggaccatgagctaaagcagcggtttaaagtatatagtcccaaacaaagaattcttactaaaaacacaccggatctgtaaggcagaggagggaggggcgggaggaagaagtcgaagagcagggtgtggtattccagggagactgaagacaggagcttcccatgggacaggcagttcatccacaggctcagcttctgcaacctccttcctgtggttactcctgctctctaagaattctgcatgttctcatcaagaaaataccaaattccttgaaagcctggattctgccttgtggtttgtgagccaatctcatgacaccaccagcccacagtgcttttcctgattccatggaggcaaactagacggagcttctagcaagtgaaacttcttttgggtagatatttgggggccgcttttaaaatttttctgacagaccaagtggtaaaaatctgtgtgtgtacacggaatgctctctcccttctgcaatgcgtttactctccttgtagaaataactgcttctcttagccggctcttgcttggagcagggaagagcaaagtcctatcatgtacacatacacagtttataaacatatactgtacaatcaacatgtacatatataatacaatatacacatgtgtgcatcctgtatctgtatactgtatatcatgcatatacaatttcataaacaagcttgtaccaggaaaaggcaataatttatatattatacacacatacatgtatatgtaaaatatgtacacacacacaaaatataccatacagagtgtaaggttcatgacgtctttctttcgttgatatttgtgctcacttattagcggtaaattattaattttagataagcccatcacagagtgaaggctcaatccttgaacagcccagggagaacttcgttgctacttttgaaaagccctttgatgtgcccaaagtctccagaagggcgatgccaaacccactcaactttgacaaagtgtgaaacgtctgtaaaaaggagttctctgatgtgtgagaggagacggaaccgagaagaaaaggccgtactctgccccccgcgggacccaggtccccgcctgctgcagagcgcactctgcgcacgtcgagccgcgaaaggttcacagaagaaaacaagagaaagaagtagcaggcactgaggagccgccggcgccggcgcccaggacggcacgtgacccgggggcggggccgcgcgggccgcgggccagtggatggggacgggggcggggccgcggctcggggggcggggtctgtggcggcgcagcttacaccgcggtccccttatttggatctgcgggaatgtgggctggagaggtcctgccgtggtaccagcctccagcctgcccccaggactgcccctgacccaggcgcgcccgctgctcggtggcaggagggccggcggagcgccatggcctgcatcctgaaggtaacgacttggatctgtggctcggacgcgtggttggccagccccttgctgctcagaggcacggagtcagccgcggtcccaccgcatcctcatctcagttgtcttttcctggcattgattttctttttgttcctttggcaaatgcatatggagggagattctgaaacatgcagctggcacagcttcttttcccaccattcctgcctcctgctcgcgcctgcattgaaggagctgcagactgttggctccaggggagagcagggctgtgtgccgaataatggggatggtagggagaggaggggtgttcccgcgggtcccgcggctctgtggagcctgaggcctttcaggggccacggggaggggtggagtggctaggcgtgagttgctggtggtgaggggcatagcgctttaaatggagggaagagtgagcggaggtgggctctactgtgcatttgatcatgtgaagacagaaacttctgagtttacaggtagtcccttaggaatgagttttctatgagatctgctagctctgtttgcccttagctctactttggaaaagttcacacgaggatgtatatgttagtagagaacctctcactctctttatgctcataaatttgaatagacaaaatgattttatgctctgccagagtgcgctcagccatcccttctttgttgagttttctttctccaagaccggattcttagcctcacctgagcatctttctgggttcacagacttgtggcctcaggtgggagaacttggtgtgagggcctcacttaaaaagaactttccatcccactggtagaggcctcccctgccctcgtttttttttttgcactacctttctacaagaacataacctggatgcatgaatcaaaaacatgaacagcatgaaagtttcctgggccttgactggagaatgcagagacctagttgtccaagcctgggggaactgtgtgacgatggaaaataccaggaaacaattcgttgttgttgtgttattgtgaagtagcatttatttctctataagatgatattaagtcatctactgtgttctggttacctgaatcgtcttctaacgtgcctggtgtcaatgatgaaaataagagactaacctcgtagaagttgtttccccttctttgcgtaaaggagatcagaagtttcctgtgagctttctgaacttcctctttttgtttcagaacattttccaggacatgaggaaataatacatcagtattacagtatggggtatttgaccgggaggctcttagcacaaggactgaaatatgaatatgagtcatctttactattcattgtgttatttgctgaaagggacattgaggagcatgatatttattgctggccatctttttctgttttggtttctcccctgccttgtcctatacatgtggtaaacatctttaatgcacatcccaaactacacatgaatctggtccaatctttctcttctagcacttcacactgctttcagacatttgggacatatctgtccaccttatcttccctccactgaaactaatgtgggctttagactcagaaagatatgtctggatgctggctctgcccactgctacctctgtgatgttggacaagttacttaaatgtctctgggccttagtttcttcaatataagatcaaagtagtggcacctgcttcacaaggttgctgtgggaatgaaataagatagggtatgaaaaatactttgtggcacaggcatttaatatgtgccatttttttcctctaacatataataataagtgcagtttggttgatccttactatatcctcagtctgtttcttataactattattttttataaaatacaaaatgttttttattctttaatctttacataaaaccctgaaagataagtatcattgttttaaaccccattttacagatgagaaagttgacgctccctagtttaagagatttgcccaaggccacacagggttaatgacagagtgatcctggatttagacccagatatgtcaaccttccatatactttactgctgttccagtactttcccaggtgatgacttttaagatggcctaataccattcagttccaaccacctttgagcacctttgagcaatccccttctctggtcatggtctagacagtctgggctggatcttttttctttgttgtctttgaaaagctacacatggagcagtgcagaatacaggtttcagtccagagacctgagttcagtgcaagcctggcttcttgcatatgattttagacagctgctgcaacctggagcctcagttttcccttgttgaagtgttcatagaattataaccattgcgttacagggtttttatgaggataaaactatggacttttttttttttaatgaaatattttctgccatttgctgaccctggacttggtgttggcatatgtagaaaaggaaagattttcctctgccctcttagtttctgtgcctggtcctgatagctaaactgacaaaaggcatattaacagaggaaaaacatacacattttatttgatgttaatgtttttatgtgtaccacagagggcttcctatataagaaataaagacccgaagaaggggagaggcctgagagtttataaagcattttaatagagaaggataaattgtggaaatgtgacaagacaaaggaaaaagggggtttgggctggggcagtcgattgtgagaaagtgggaaatgtatggggaaaactaatggaaaataggtgagtgtttttactagagatttattttggtgttgactctccatctttgatcataagaatgttctcctcttcctggcacagggaagggacatttctcatgggaaattttatgccttgcttttaggtagaaatggggaggtcagaaagcccttcctgtatctgctttttctcaattgcctttagctcaaaataatcaatatgccaaagtgatatattttggggtagcctgttctgattccttttacatcacaagatgcataaaccattgaccccattctcaaatggcttatggtttagtaaggatgatagaaaagtaaatgagtgcttaggttacaatgtgaagaataaaactacataggtccatggagggcatagtagaagcatggaaggagagagcaattacccctgtcattgggtagttcagacaggcttcccactgatgatattggagttgtgttttgaagactaaataggatttactatgacggagctcgtgttttagaaagataagttttgaggcagtgccaactttgttctgtgggctaagactttaatcttctcaatgaattttgcagtagattttactatccatttttacaaatgagaaaactgagatagagagatattgattaaagtatcattattgcctacacaatagtgaccctcactaagaagagacccccatgctgtggcagctaattttggtcttttaggggatatggaactatcccctcaaggtgctgtgcatgctgagggcccattctgccaatgcatagcgctagttctcgtaacagaacgatgatcacttcataatcatttaatttaggaattcagacttcacattgcctggactttaaagccagaaatatgtgacttttaattatggctccactccttattgattatagagccataacaagtttcttgatttcactacctcagtttccaaaatgggaatcatgcattcctcaatgggttattctaaaggttaaatgagataatctgtatattagttatattgcagggggaaaaaagaaactctgaatcttagcaggttcatttcttgccatgctcctggttaggcagctctcctgtgtagctctaccattgaataaagaatcaactcaaggaccagtctctttattattattatttttttttgagacagagtctcactctgttgcccaggctggagtgcagtggcgtgatcttggttcgctgcaacctctgcctcctggattcaagcaattctcgtgcctcagcctcccaaatagctgggactacagctatgcacccctatgcctggctaattttttgtatttttagtagagacggggtttcaccatgttggccaggctggtattgaactcctggcctcaagtgatctgtgtgccttggcctcccaaagtgctgggattacaggcatgagccatcgtgcctggcctaggaccagtctcttttcattaagcagctctgatgtcttcttgggccccagagcccttgtcagattctctgttttcagcagctccaggagacagattacagggaagatctcgtggggttgtttaaaaagtctctcaaatttgatagacaggaaaactctttgctttaatttgtatttatttgatcattagtgaagttaagcttttaaatttgtattagtcatttgtctttcttcttttataaattatagatactttaaaattttatgcaagaaaatctatccatattttcttttatgatttctacccttggtcagcaggtacattttcagcacagtgtcttgtacactttcatttttaaaaaatataggtgaattgtattaacttttatattggaagtggacattgagtggacatgtagacacaagatccttgagaatcatttctgccttcgagaagattatggttttgccaggttgatgaggcttatgaacatgaagcagttagctgatacgatagatgcatgactaagccacaattaccttctctccagtgacctgtcctcatatatttatcttgattgataggtaattagatgaatgatgataccaagttaggaacttggcgtcttctcatttcctcttcctccccctgccccagatctaatccttctccacagtgcatcagttctgtctcaggaaaacctctcaactctgccccttactttccatccttactccccctgccttgttcaactcccactttagagtcacatctgtggtcaggccatcccctgcctcagcaggcttcctctgtgctcctgtggtcttagttcttgtccctgtagtagcaggtattaccatgtactgtcaataaactgctttcatgcccagctcttctttgactatcaaatgttagggagccgcggccttccagtgtttactgagcatctgtaattgagttctgttcttaccctaagtgagattatagactcagtgagaaggcaaataattaaactagtaattaaaagtatgcgaggagtttgaaaattacacctcatggtatgggagtatatgggtggggtgttgacggttactgaactgaatgtaaaaggcagaaaaggctttgttttattcaacttggtatttctaagaactagcttggctctcagtaggtgatccttaagtgtttgctgaatgtatcagtggtgttattaatttttttttatgtcagttatagacacaggtccaacctgtcttctgaaaacagctgagcatttcaaggatgtggcatggattttttactctaatgtatagcaggcagattagagcttgttgattagtttgctccttaaattttttcttagtatgtttcttgtaggtaggtctgttaccattcctcatataaaatctggggccaatttaagatctggggttggggggatggggagatgagagaactggactagaaggagggaaaaagagaagtgtaggcgtggtttaacttttgtcatgatcattttggttccccagattaacagaaacagataaaccaaaaaaaaaaaaaaacaatcaaaaaccaaacacccacaaccaaatgattgtgtggttctcaaacgatgaggtctcaaagcatttgaaaacagtatggcttcactgagactggaaagccacagggacttcacaggtacacagatgataaatctgaaaccgtaggataaccctggcaagtagacaagtcacttcatttaataaatctgctatgacatttcttattgctgcccaggaaatgctgaattctcagcagctgcctggcctaatttccagtcttacagtgactgagcagatgcttttgctacgtatatcagcacattgtggggaatgagtggcttgggtaaaagtagtgctctttggatggattgataacaacagcaacaataggtgccatttattgaacagccagagtgctcaggctggcttctgtgctaagtaaacttttattacaaatgaagacactgaagttcagaaaacctaagtaaattgtccgatgtcctgtggtcagtaagtgatggaggtggggttcaccctgacttcgtgtggttgtaaagcaggggtgttcaaacttttggcttccttgggccacattggaagaagaattgtctgggccacacataaaatacactaacacgaatgacagctggtgagctaaaaaaaaaaaaaaaaaaaagcaaatcgcaaaagaaatctcataatgttttaagaatgtttacaaatttgtgttgggccacattcaaagctgtcctgcgctgcgggttggacaagctatagagcttgtcttttaccttcagtgccaatttagtaaatatttatagggattctgaatttatttcaccatcttctaccccagacaatatccagtctagacaacttcctaatctggtggcctgatggggaccacttttagctgtgtcgtttttatttgttcctttaagtttcctttgtgacagaagaactagaggaactagaggggctgcaaagactgaggagataagaaggctttaattctgtttaattctgaatagatctttgaccctgggcaagttatgtgaacctatgtgtcctttttgggggtgggagtgagggagagttggatttaccctgaacgcaagcttcagggcccttccaaggttctgggaagagacactagcattttggtatttataattttatattcattttatcaaggaatcccacaaatcgtatacatttcaggctccccaacatagatctgtcccttgggtggtgttggagaaccaaagagataatgcttgtgaatgcactttgcaaagcagagtgcactgcataggcatgaagtggaaatggcaaaaaacgttattagtattattagtactgataatagctggaatcgaggaaacctttgttgaaggactagtgggagaaagaaggggtttaggtctgaggaaaacagggaagcctattaagctttctagtaaacgactgagcgaagttatgaaagcttctccccaggagaaaaatttctgtttgtaagaatttaacacacacttatgcctgagggctgggagttgaatgaggttcttttctgtttcctggctttagggaacagtggaggaaggcatttttctaattggagggagtagatttacaagtgctacctggatcccattaccaaaagctgcagttagctcctggttattaaaaggctcattattcagtttatggattatccagaccccatttgcctccagccattctgatgtacacgttttatgccttttactgccaattagcgccttcacctgagcagagaaaaaagggggtgctaaaccccaaatttgttaatttctctccttgttagcagctctgtaaaggtttgtcagcaggagagtgggcctaggaaaaggttcaaatgaggtgaagggattatctgcgctttctctattgctgtttctctcaattcaaaaattgagactaggctctggttctgactgtaaactgatttaaagtcactaagtcagagaccttggcctgggatattaagagactttaataaacagcagccctagggtaggtgacattctttgagaagccccttaccccacactccatatctccaggcctctctttcatttcctgtgtgatgtggaggtgtgggggccaacaacatctggtacttgagagagtgagggagaatttactcctaaacagatttgtcggaggccagaaaaagaggatacttgggtcgttttcgtgttttttgtttttttttttaaaggtgtgtttctctgtgcacacatagcaaatataaatatacatgcacattcattcaatcttatcttaatatttactcagatttgaaaactatcgcacgtaaaatccttttctggaagggacttctctctgatttcaaaggctatttggtttcttagtgaatttattggctgtgcatttactacacacgaagtaaaaacttctttggtcagctatggaaacgatttgcatcttgctctgagaagatcatgatcacaagggaattggaagtaaaatgtgtatattctgggttggaaatgagtcctgatctgggattaaaacctggttgcaatactcatcttagattttgagaactagaatgagcaaatgactgtcgtgagttgatccctctatttgggactagtgggatatgcacttgcggtgagcagggctgtgattcctggtgctgtttgctgcgcggctggccgcgacaatgggctggactcgaaagaaagagaagtgaaagtctctctttgtgaagcgtttgccttatcagagaaagtggtaccagagaagagacacgagaactgctctctagggtgtgggcagtaagaagactgtggggtgcagaggtcagagctagaccgactctgagtcccatcctggctttgtgattaatatgaataaaacaataatacccttatttcatggtctgtagcagtgctgtccagcagaaatataatgtaggctttttatgcaattgtacatttcctaagagccattattttaaaaaagcaaaaaagaaacatgtagaatttaataatgtgttttatttaacttggtatatccaaaatactttcatttcaaaatgtactcaatataaaaattaatgagatatttatatctttttttttacaaacagttcttaaaactcggtgtacgttttacacttatagcatctctcagtttgaattctaaatttttcatcagaaatatttgatttgtattttgattttactaatttaaagtaaaaaagtaggttcactcgtctaagttgaattgtgcttagaccttttccagtagctgaatggaacattatttttaaaaggtaaattaattaaaatgaaatgaaattttaaaaatgtggtttgttggttatgccagccatgtttcaatgctcaaaagccacatgtggctagtggctactgtattggacagcatgctccttcaggtattcatcttcactatcagaagagaccactagactcagacaatgagagtagcgtaaggggctgcagaaaggattggctgctgggtcaggttcagatggggaggacacacctgttggctggactcctggcagccaaaggctggcgactgatgagcaagtaatgagtgcctgactcagggacacatctgagcgtttgatgagcccttgaaattttatctgaaaatgcagtcctcagtttcaccatatcctgagcctaattttaccccagatgttgtgcagctgtgagttttcccaagggagtgctgctttgtggtatgtgtgagttggctctttggtctcagtgtggtagtgtgaactcctggaggctttgagggcagacacagacttgaagcacttttatttgagttgtttcattgctccaggagggtattacacatatgggagcaatttaaatgtccagaacaaaccacatgtcttcttttaagtccagagagcaaggtgattgcagtttctttgttcggtttgcttattttttactgcttatttctgtgtgcataaattcagcgacatgctaatagacatatggccaatggtgcttagagaaaatctgtttgtaaacctgaatctctgttttgcctacacatttgcattgtattcctgccctgctccaactcgttgtcctagaccatccagtgttagcatttttctcatgagatgaacatttcgttataataatgacagtagctgtcatttgctgagggctttctgcatgtcaggcagcctactaggtagtttacagatatttattgtctcacaacaaccttcagcatgggcaggattggtttcatttgacagatgacaaaactctggcttgacaactttaccagcatgagagtgctagactagggtcagcaaactacctcctctagaacaagcccggcttgctgcctatttacatgcagctcctgagtaagaatggcttttgtgtttttaaatggttgaaaaaaaaatcaaaagaagaataagagttgacaggtgaaaatgatatgaaattcaaatttttcacccataaataaagttttattgaaacacagccatgcttattcaccatatctgctttcatggcacaaaggcagatttgagaagttgagatgggtactgtatggtctataaggcccaaaatatttactacccatctctttacaggtaaagtttgccaacccttgtgctaggctgttgagttctttcagtggactttaagaaccacagtgaagagcagtgtggttctttcatgtctggccagcaccaggcctcatgcctcacactctgaatggtggggatatttactgagcatagagctaaatacggtacgtggaagaggagactgaagcttagagaggccaagtgactgcccaaagtctcatagtggggctggaattcagacccaaagtctgaactcctaacagttatgttgacctcagtgctggaaaacttgaactacatcaggaccactggaagggacggttgtactagagtttgctaggccttaccactgtttctgattcttccagtctggggtatgactcaagaatttgtatctctaacaagccaccaggtgatactagcactgcacatctgggaaccgcactttgattagacctaccatatgacatccagctcaatgaacagttgttgagttatggaaattgcagagcatggattcaaacccatgcattccccaaaagaaattgactagaaatttaaatcaatttagcaatttaagtgcagtgtactccagtcaactttcttggcattgtaataatttgatttctgccttcattgttttcattaaactcaagatttcttctgatgctatgaggctcaggccactatgcacactgaaaaacttttgcctttgcacgagctaggggctgggactaaaattaacccctcactggtggcaccacttgtgtctggaaaaatcagtttgtgattatttctaaaccaaggaattttgttcctgctgattgcatatcaaatcctttctcacactttggaccccccacttctttgctggctaacagggagaattaggggtgcaggaaacagctttcacagttagattatgctggctttggttacaaaagttaatgcattagtgctagagttcactatcttaattactgggttagtctcatatttaaaaagtcattatttaaggattaggaatggggaaatcgaagactggtgaaagacgatagttttttttcgtgttgatgattcatagccttgttttagacttttataagtaataaaaagcactggatactgctgatttagtctcttcctagaggctcatatttgtgtaaagaaggaaattactctgtaagttttcccttttgctttttcctggctctctctttctgtgcctttgtctatattgaagcctatttttctgatgttccttcttcatctccagccttcatgccccttcccaatacaggtgttgcagggatcgttagctagaatgtctaaggaaccatactatcaacccaagagaagggaagcttggtgaactcttaaaaccaagtagatgaaaccttcttgcagagtcccgggatataagccattccattaggaatccttccctgggaaatatgaatcattgctatgcctgatataaaatcactgacatggtgttcatgacagctcaccatgtcatccctcacacctttgccatggcctggaggctgactacactactacttgtgtttgttcttttattgctgaccttgtcaaccaggtcattctttctctcttcctatttctaagagaaaattcattccccagaaccagcaagtacctgaaccattgccactttatatgtgctgccttatttatttttcatctcattctttggctgggagtaaaagaacctttctctcctaccctggtttatgttgcctgattatctgttcgtcggctggtttgatgtttatttaattctgccatgctgcttaaccttagaagcctggttttgtggcttgatttgagccaagatttctgcatgtgacttctaacttgtgggtaaattaaggtttgtttttctctcacccatctttgacccatgatattaaaacgttatttgaagaaaggacatccaacccatataccactctaggtttctgtgttaaaactattgaaatccactatacattatttcagatttatgtaggttaaagggatctgggtttgaccttttccccacttatcttcagcaaatagagacatgtgaagaggaagtttatttatcaagcacttatagagaatctaagtactgtgggtaagaggaggggtagagagaatggagataaaagattcactgaacatctaattttttttctaggggaatttagggtgtgtatgaatagtaataataattgtaacaatagcttacatttactgagtgcttacctgtactgtgttggggctttatatttgtggattatctcattttatccccacaggctcatgaggtacatccacctaggtgaggaaatgaaggcttggagaggctaagtcacctctcaaaggtcatactactagtagaagaggggttatactttgaatccaggtgtttggctgaagtaaaatacatttcctagagtatattactcagatcatacatagataaacctatttgtaacttgcccatgataataataactttaatgatacaataacatcagcaaacattttctggacacttactatatgataggcactgtatttaattcatacacatgatttattttaaagtttaacaatcctattagaaatctattttatctgaggaaactgaggctcggagagaacttaagttctttgtctgaggtcatgtggccagtgagtggaacacctgtggggtcatattatttgtataattgttattgttattagctaacagttactatgtgcagtaaggactaggcattgttctcagcactttacatttattaattcacttaatcctcattttacaggtaaggaaactgaggcacatagtggttaaagttacaaaactattctgtggcagtggtaagatttgaacccaggcagtttgaccctggcatctataacagatgcgcctatgaccacagactttgtttcctttgccactttggtggtctgtctcctagagcagagaatcactagtactattacaaaccattccagtaacaaattaacctacttaaaaggagcttgcggaaatgaaaatataacttgaattttgacttgaaataaactgaactttaaaaatcctttgaggctttttaaaaaatgtatttgaagaatttccaatcagatcaacttaggaaggcccacttaggtcaaatcagacatggaggaattaattttcttgtggagctggtgttgagcctaagtccatcgtgctgcctgggtggggaatgccaggcagctttccttctttgctttccctgttctctcctcaatcactcatctctctagataaggccacagaacagccagagtgatcttttaaaaagtaaataagatcatggcagcctatttgtttgttgatctgtcagtcaaaaaactaaaaggatcacaaaaaaaactaaagggatcacaactgttttgcttatcgctgtgtatctatcatctagcacaatgcagtcaacaaaagaatgattaaatgaattaattttaggcaaaaaaattagcatgtgcaaagatccggtggcatgaaggaacaggacattttgggaaacagtgaaaagttgtgtatggctggcattgagctggctttgggagctggaagagataatacagttgggtcagatcataaggatcatgtagattctgtcaaggagtgtagatttgatcctctagaaatggggaaacactaaaggattttgttttttttgaggtggagtctcgctctgtcacccaggctggagtgcagtggcacaatcttggttcactgcaagctccacctcccgggttcacaccattctcctgcctcagcttcccaagtagctgggactacaggcacctgccactacgcccggctaattttattttattttatttatttatttatttattttttagaagagacggggtttcactgtgttagccaggatgatctcaatctcctgacctcgtgatctgcccgccttggcctcccaaaatgctgggattacaggcataagccaccgcacccggccacactgaaggatttttaaacagagtccttgggttggctctggccattgtattttgtatttggaaattatttgtctcaatgatgattttgctacaatgattgcacacgggtaatttcaaacagaactttaaaagttaaaatatgctaaagatataagtgtgcttgtttatgacagagcttggagttgtatgtatcaaaagggtcaagccaatgacaacataactaaacattttatacaaataagttattagttgtacaggttgttaaattttccatttgatgaagggaatcaagtttgagcattatctcttgggtcatttagacgatacattgtggatttatggctccttttggtagagtcaactcttgacattcggttgacagtattgcccttaaggaggatgctaggtggtccttccctcagagtcactatatagcagctgtctgtgagtcctgccttggaaagacaatattattctttcagcagctattatttattgagcacctacaatgtggcagatgaactaatcatcttaccttatgtgagtaaactttatagcatctctttgaggtagatgtgtccccattttataaatggagacactggctcagagaaggtaagagtaagttagagtgcacttacatacacctgggtgtgcactgagagtgtatttatatacacctagaagttaagaataacttatctgagccacggtttctccattgtaagtgctagtggggccagggaataaaattcagatctgtctgacccaaaataccttgcttttaaccatctggtcttctacctctgtagaggagagaatcatttaggaaggagcctatggaaataattttgatctgaattaaactgattatcttttaaaagttaaggagttcttagaacttttctttgatgttaagaacttttaaactagattatacttaagaagacaatttatttcacttgcttagttcaggtcagacctggtggaattagtctcactgataagcagatacttgaacagaatcttgatgaataagcatgagcattaacttcagactaactggccggatggctgtgcctcctggtctacccacctactgctctccctgccacaagttcctcttcttcatttgtcactcttttatctgttcttggcacagcaaccagaaggaattttaaaagatgcacgtaagatgatctcattccctttcttatctggtcagtggcttcctttttcatttggaatatattacgatctttgaatcatgactccacaggcctacaggatccctttccagtctcctccaaggcactcagcctcttattattttctagctactctagggtcttttcaggccctgaatctgaaacatgacatttgtggaaaatgatgggaagtactttatggctaaagcttagtctggactttgggggctggtgggacattaggtagactaagggtttggacttgaccttgtaggtaatggaacacttttgagacatttttagcacaaaactaaacgtaatggagccactgagctgaggagtagaatattcttctattgtctttttagagtgctcagagtccctgcattgccactggtcattgccctttgtacttggaaatgacttgttccaattatgacagccttgcaattgcgcaggccgaatgtttatcagaaaactgtaagttaaaacatggcaatgacatctctctccttgtgtgtcatatttaaggcacatgttctctgaaatcaagaagctgggctaggatcttgcactggccccagaccatattctgttgtgaccatgcttcagtgagaatgtgtcacgtgtaaaatgaagataagcaagaatatcagtctgtttgaaagtgctaataaaagtaaaatattcttggcaaataaagctattaatgtaggtgttgaaattttcatttagtcagagcagtcctaaatttaaatgtaaccttttgagcccttagatcattgagttaagactctttctcatgcggatgaacagtaaatgcttgttatctgaagatgtaaattgggaggagtaagggacttctgccccattgtgcattaatgcctactgtttgtttccctgacttagaatgtggctccatatttttgccctcaaggcagctattgatggagtcatcctatgctccaaaccttgagctaagcaccacatatagtcatgtgccacatgacgacgtttcagtccagtcaatggcagactgcctatatgacagtggtcccataagatgataatatcacatttttactgtatcttttctgtgtttagatatgtttagatacacagatacttaccattgtgttacagttattatacctatagtatatagcacagtaatgtgctgtatgggtttgtagcctaagagcaattggctataccatgtagcctaggtatgtagtaggctacaccatctaggtgtatgtaagtgcactctatgatgctcacacaactacacttacggatgtggttctcagaacatatccctatcattgagccattcatgactgtatgtatatgtcagttaaagcttataacaacactgtgaatctgttttttcatcctgctgtgagtttggattgtttatgaggaaatgcgggcttagagaatttaattgcttaaagtcagagagttaggagatccttcagttttgactgatgtcaacctccgtgctcttaaccccagctctgtccaagtcataagaccatcctatagacaggccagaatggtacaagtggaaacacaggaagagatcttctttcctatagaccttaaataaaaatgtctcttggatcatcttgtctgaaagcccatctttttgggtttatttctctgattagagagatactttgttttgcctaatacgtatttttagaaagtagtacaggcatcagtcttttgtaaactctttgagatttaaataaggaagtttgctgtttgaaggactttgtggctaatcccttggtaaagaagtatcttataattgactatgaatgccttagtagctattctgtttcataacttgactttcaaaaaataataatggcaaaagatgacattttttgataagcaccaggtgcttttagaagcaatttttatgggagtttctaatctaatcatcacagcaacccttcaaaatgggtgctattattgtgtccatttgacagagaagtaaactgaggtgacagtggctagatgcagggatggcttcgtggcatgtgacctgcatgatcacacaggaccccatgcttagaagggccccatgcttggtgtaatattctgcaattattgtcgtagaagacttcataattttgaacaagggccctgcatttttattttgcatggggcctcataaattatgtggttggtcctgcctagccaaattgtccaaggccattccatggtgagcagcagagttgaggttcaaacccagactgcctggcgtccagcgtgactgcctggcctccagagtgattgcctggcctccagggtgtgctcttccattgtgtcctcctgcttcccatattcccatgttcttaagcactgtcctccatcttgtttttctctggacgtgtctttagaggcagaggcaggtggtttgactcatgtctgttgaattctaaagattcagaatttatttgttgaactgaatgtttgttacatacaatttcctaattaagtttgtgggagtgcagtagtaaagatttgaagatatgggaagaattgcatatcctggctatagtgaaaaatcatagtctaaaaataaatgggaataaagtggaaacactgtaacatgtttgctttgtacagctttaatggaaaaaggaaaggaaagaatacatatgaaaagaaggcagtcccttggcactgcctgtctcaatgctgtgtgctgtggactggggacacttaattaccacgtacaattttatggactgttcatgagaagcttctttttaacttttcatggattgcagtaaaggaaaatatagaaagatagaagaggattttcatcacgttggcaagaactgttcctccatgatctatggctagagcctgaaactgcccaagttccatctctcagcattttctgagaactttctgtgaagagaagttcagaggccagtaaaacaagtgtggtcacgaaaggaatcagaacatgactcccccaaatctgcctctttgacataaaattatttttgagctgaaggaaattaagaagcagtaaacaggggaaaagctctctctatcctccccattttctgcctgaagacaggatataaatcctcctctactggagacaactctagactcatcagctgagagacaacgccagaggaatctgcaaactaacctcacttcatcagttttctcctgtatatttaccttcccacagtttcccatccttggaagcccaaaacctcacttctttgtcctgtcttttcttgacaactttattgttctttgttgaacatgccacataagccagatgccacataagccagagttctaagctgctgctgtgggttacctttcattgaggtttctcctgtgtgatgtacactgcatgcattcataagttgtttgttttacttctgttaatctgtcttttattacgggagttcatcccaactaagaacttatgaggcttgggggaaaagttatttttcctccctgacagtcactgcagggcaactgacgttctgacagagggaggcatctgccacaggaacacgaggaaagcagctgatagagtcaggaggagtctagaggggtcaggggaattgtccatgtagagaagagggacagagtgttcatctatggagggaacagtaaggacaaaatcacggaggcgagggagatcacggtcaagatgaactgcagtatttggccctgggggaagtgttagaaaggtaggtggggaccaaatgctattgtgctaagttaaggagtgtggatttatatatcccaaggcattagggatggtgatcataatagctagcatttattgagagcttcccaagtgctaggcatgatttagtcccataatatccttattctccaacactcctttggggttagttactaatctcattttacaaagaagaaaactgagggacagagacttttaataacttacctaaggtcacacaactagtatgtttcagagccgggattgtgaactgggaagtctggctccagaacctgtgttcttgatggcaattttatactgattccagtgatggaagaattttaagtagaggaaacgtgtatatgatttacatttccaaagattgttctaatggaagtgtggcctgctaggtgcaaggagatgagcatctctggttttgccaccacagaaactatgaagacatgttctttaaaaatgacttctcctctcttcccttggtatatgggtgcaatcaattcttgctttaaataccttctccctgctctttctatctctgaacagattcctcacccccaccccccaccgttccttactcactgagctttatgctacttgaccatcactcaacatcactcaccaacctagccttctttcttcttcctcttggtactgctctctagattataaacatccatgtgatttctggtcacctgtatgtatacctattaggtgatacgatatgtacactcagtggtcattattaatacatgaaatggctgaggactctagaggcatgaatggagttagagtcctttctgtgatatatatacccctgggatctggggggcaggcagcaaacctctttggaccttagagacaaactgggcatagtaatcatatctgctgtactggttgttgtcagaaacaaaatgaaataagatgatatactttgtataaataatgtttatacaaagtataacattatactttgttatatggctacattgtctctagtgtaagcaattttatttacaatttgtactctacttgttttgatatcatttatggcaactttatgtattatagcatttcaaacctggagggatctaggcagactgtggttgattagttgatgtttagaaagactggttaattcactgccagaatgcagatggggtggttggggaggataactgttttctccaggcagtgggtcagactgttcccaaagtgtgatcttacccatatcacttaacctctctgggcatctgttacctcctggaaaatgaaggcaaagctgcctacttgtagggctgatcatgaagaagattgagatgttttctgtaaagtgcttggcacttagcaagtgttctataaatactattattattttcattcctgaaaaggaaggagttagtattctagtgttgagtgtcaaaagactgggggaaggagtgtgggaggggtttatacactttccttcccatcctctcagttgtcctccctcatctccactccctccatctccaatcttttctcccctcagggctgaatgaaattgaatgtcttgtaaacgtgtgcagcctttgccaccgggccctcggacatgcccttttaacattctgacataatggatgaaaacatgaacagctgacagtcattggttaaatctccaaacttttcattccctcacctgtggggatggtgccctctgcctggtgaacccagcccaggcagagattgcaggagctggctctgctggtggtgggcctggttacctaggcaacgtttacctgtgctgatgacaaagggcctgtcactgcctcctgatgcatgcagaagaatattaagtttgcggggagatggaaagaaacaattttctcttgaaatgaggtagatgcaggtgttaatttctttggagtgaattttctgttttcagagaggcaagggtagagcttaaacacaaacttctggctgaaaatatttagtttgcgaacctggcaagcctcttaagaaaaaaaacaatcctggtgccgggactgttaggcttcctgtcttttcagcagcttattgcatttgttttactgctttgaaggattggaagtctctgaaggccatttctttaatgacttggaatattaatgtaaaaacttgcttgttggacaatacagtgaatactatagctttgcctctaattggcttttcagtccttcacgctgtaaagcccccttcttttaagacattttctttattttgaaatatattttatatttataaattttatttataaaatatctttattttataaataaattaataatgaaggaaagtgcaccaaacaattaaatagcccaatgatttatcatgaagtgaatatattgatgattgctgccgttaacaaggtgaggacagaacatcgtaggtgtcccagaaacagtccttctccccactttcaacccttcccgtctttcactctcccaaaggagattgctgtcttggctttccaaagcaaataaacgaagttcttactagaggttttgttccctaagtgttcatttctaaacactctagtttagttttgtttcttttgaatttcatgtagaggaagtcatagagcttttttttttttttttttgagacagagtctcgcttttttacccaggctggagcacagtggcgtgatctcggctcactgcaatctccgcctcgcgggttcaagcgattctcctgcctcagcctcccaagtagctaggactacaggcatgtgccaccacgcccggctaatttttgtatttttagtggagacacggtttcgccatgttggccaggctggtcttgaactactgacctcaggtgacccacccaccttggcctcccaaagtgctgggattacaggcgtgaaccactgcgcccagccagagcattgttttatgtatggcttctgatatggtttggctgtgtcctcactcaaatcttatcttgaattgaagttcctataatccccatgtgtcataggagggacctggtgggaggtgattaaatcatgggggtggttacctccatgctgttctcgtgatagtgagtgagttctcatgagatcttatgattttataaggggctttccccctactttgctctgcacttctcttcgctgctgccatgtgaagaaggacatgcttgctcccccttctgccatgattgtaaatttcctgaggcttccccagccatactgaactgtaagacaattaagcgtctttccttaataaattacccagtcttgggtatgtctttattagtgcatgagaacagactaatacagcttctttttttcagtgttatgtttatgaagttcatccatgttgtggtgtatagctgtagttcattcatcttacttgctatatttcattataggaatattccactatttatctatccatttggccattgatgcatatttgagatatttccagtttttagctataaatactgatgttgtgaacattcctgtacctgtctcttggggcacatgtgcatgcatttctgttggttgtgttcctagaagtggtattgttggggcataagatatatgttatctttggccttagtagtataaaaaggttttgttatttttttttttaacaaaaagcaaaataattgctctcatacaaatacacaatgaacgtgtgtgaaagatgttatttaactcattaattaatgagggaaccagtacatgttagcagctggttcaaaggagaatggaaaggtccatgtatatgtaggcaataagagatgaggaaatgaatttattaataaaagtgaaatgggtctatccacaaggcaataatttgttgcatttccaccatacatattcacttgcgtttctatggacgggaagaatttgtatcattatcagttttctgcaacttaaatagttgtagaatagcagaaagacatagaaaggcatagtaacacagtagggtgcattagactgcacgatcacaatgcttttttttcttccctattctaaatctttcacaatttttcctgatggtagatattaccaacctgttttccaaaattagtgtatcaaattactcttccaccagaagtatcacagaagttccttttgcttctggacaacaattggtttaaacttttgccattctgttaggtaggcagtggtatctctttgtggttttaatttgcatttccttgattaagaatgaggttgaacaccttttagatatttattggctatttgaatatcttcttgtgtgaactgcctgtattagtcttttccccatttaaaaaaatgggttctcttttaccttttaggggggtaggagtgttttatatatattttatgcattaatatatattttccaatcatatgtgttgcaaatatcttcttccacattttagcttgtcttttcattcctttactggtgtcttttatgaacaaaacaattatactacagcctattttcttaattttttattttacaattaataattgttaaaatccctccttaagaagtctttcactagtttgatttcttgaaaatattttagcatattaatgtctagaaactacattattttgcctttcaaatttagatttaaaatctatttcgattttatttttctgtatgatgtaaaatagggcatcattttttaccccaatatggtatccaattttcctggcatctttcattgaaaagactgtgctttcgctactgcttggcagagacaccgaaatgttcatatgtttgagtctttttctggatatgttgctaaattctagtgatccattgatctatttgttcattttaataccaatgtcacactgtagttttttatgataagttttatgataagtctttatttctgatagagccaaacctcccaccttgctgtttctctttaaggtgatcctggccctttatacttcctttgagttttagaattagctcataaaattccacaaaaattgtggatcttatttactgagtttttatttaagactgcattgaatccttaaaaattccacttctaggtatttatccaagtgaaatgaaaacgtatgtccacaaaagagtggtacatgcatatattcatagcccctttattcgtaattgctccaaactggaaacaaccagtatgtttataaaatgtaaaactactaagcaatgagaaggaatgcactgtcgatacatgcaacaatgtagatgaatctccaaaacattacattaagcaaaagaagccagacatgaaagagtacgtaatacgtgattctatctatatgacgtttataaaagccccaactctacagtgatataaatcaatcagtggttgactgaagtcagggatgaagtgggcagattagtgggaagagctttacaggggcatgtgggtatcaactggggtgatgattacagagatcactaaaccacatcctaaaaatgtatatattttattgtaaataaataatactttattaagttttcttttaaagactccattaactccatagattcgtttaggaaggactaacatttttacaaattgagtcttccaacctaggaatatgttatatagctccaagtactattgcatttcaattctcacattaatattcttttgcttttatgtagaaatttttcatatttttcaaagaaatatccacttattttgaggtattgttaagtatttatgatacaatggaaattaaaaaattaaatttaattttgtttatagctggtttataaacatgtagttagtttttatttactgaaaattatatccagcaatcttgctatattgacttattaattttatctgtagattctttggatttctacatccacaatcatatcatttgctaaaaatggcacttttgcttcttcttttctagttgtgttatcttttatatctttttttacctgattgtactgactccaaaaattaatacgatgttgatatcaaagagaaagttgtcaatattttatcactgtgttaggtttgcagtagtgtttttatagatatattttaaaggaatttcccttctattcctcctttgctaagaagttttattcattaatggatgttgaattttatcaaagctaatcttgcatctattaaaattattatatgtattttctgcttaattctgctaatgtaatgaatatttgtaaaatgttgaacaaccacgcatttctggaagcaacccaattgggtcaagatggattaacatttttatatgatgttatatttagtttgctaataatttgtttaagctttttgcctctatgttcattaatgaattagacctgaaattttcctttctcataaagtccatgtcaggttttggttatcgaggttatgcttaaagtgagttaggaaatgtattctcttattgtttggaggtatttgagtatgatcagtattgttttttctttaaagttctggtagaattatctggggaagtcatcagaatctgtttttttttttttcctttgtgggaagttttaaaattatgcattaaaattttttaatggacatttttttaatgccagttttagattcacaacaaaattgagcagaaggtacagagataacccatataacccttgccccatccgtgcacagccttccctgtgaccaagatcccccatcagggtgctatatttgttacaattgatgatcctaaattgacacatcattatcacccaaagtccatagtttatactaggattcactcttggtgttgtacatcctatgagttttggacaaatatatccaccattgtgtcacgcagaatagtggtactgccctaaaaacactctgtgcctgcctatccatccctcccttctaccgtaacccctggaaaccactgacctttctttctgtctctatagttttgccttttccggaaggtcatatagttggaatcatagagtatgtagccttttcacattggcttctttcacttactaatatgcatttaagtttcctccatgtcttttcacagcttgatagctcatttgtttttagcactgaacaatatttcattttctaggtgtaccagaatttgcttatccattctcctactgaaggccagcttggttgctccaagttttggcacttataagtacagtttctgtattcgtaaacacagaataaacacctatatgaagatttgtgtggtaagagtgttttcaacacttcctcatgttgatcttttatattgtatgcttgttttcacttcagtcacgtctgctctttatccatttcctttcttctactttcttttgtttaaattgactgattttaaaaaatgatttcttgaagtggttagtagattctcaaattttgtcgtaatgtatttacacaatagggttccccttaagtactgtttttgctgttttagatgaaatcattttattatcattcagttaagagcagtttctaatttctaccagggattttctagccatcttttcattattgatttttggcttcattgcattgtgaggaaagaacacgctttgaatgatttcagtgcttgaaatgtgttgagatgtgtttgatttcataacatctggcatatttttatacgtgtttgctatgtgcttgaaaataaagtatatcctctatttgttgagtgcaatgttctatatgtttatttggccaattttgctgtttatgttcttcagattttctgcattctcactgatttcttttgtctttttttgttttatatgtttctgagagagatatgttaaaattccataatatgactgtagacttgtctttttctcaattacaaaggatcttccatatacctagtaagactttctgccttacagtctatcttatctgatattaataaaaccacaccagctttctttcagttagtatttgcctggtgtgtttgtgtgtgtgtgtgtgtgtgtgtgtgtgtgtgcctatttgaatacttttagctcctgcatttctatagcattatttttagatgtgtctcttgtatacagcatatggttgagttggacagaatttgtcttttaattgcagcattgagttttcctacttttaatgtaataatacacgggtgggttgaaatttattattttattaatttgctatctttcttttagtcctgcttgttccttgttccagtttctcctctttttctcccttctgttgaattgaggatttgttgttgttgcttttaaccattccactttttatttgtctattaccttggaagttgtatattcttttattattattttggtgcttacactagagattatagtatgcatcttgactcaggtcttagaccactttaatggcatttatcactctcttgacttctgtgtcattgttatgtattttacttctatacctttcagatgcccaagacattattattattattgctttattcagtcataattcattttgattaatcatatatttattcttttctttgttcttcattttattttcttgtattatttatctttcatctgggagcactctctttttgcctgaagaacatcattcactatttcctttattgtaggtctgttggtaacaaattcttttgttttttgtttgaagtgctttattttactatcactcttagggatatttcctctgggcataaaattctaggctatctgttatgttctttcaatacttaaaagatattttatttacttctggctttctttatttctgttgataagttagataaaaatccaatttttgtttctttttcacccttatgctgatttttagtttttttttttttttctttgtggttttagcagttttattgtaattggcctgggtgaagttttctttttacatttcctgcttggggtttctaggattctttgtcttggctccttctgaggcctgatatctttcttcagttttggaaagttctcaggcatcattcatcttgtcaaatattgcttttccccattcagtctcttcttttccatttccatgggctatagttacatatgtgttatacctcctcactgtatcctgtagtgtcttatcctgtattttccatccttttgtctttctatactttattctagttattttcttctggcttctaattcctgcttctgctgtgtctgttcttcctttattaagttattaattttagttaatgtatttttaggcctaaaattttcattcgactctctctgtttctgagtttctcatttttatgagttccataggatggcgtagcaaattactagagactgggtagcctagacaacagaaatgtattctctcactgttcaggaggctggaggtcaaggtatcagcagccacactccctccaaaggctctagggaagaatccaccccttgcctcttttagtttctagtggctgttggccttcctttgcttgtagctatctctctgtccctccatttcacatggccttctcctctctgtgtctgtcttaaaatttcttctgccaatctcttataagaatacatgtgattgcattcagggttcatcttgataatttaaggtaagtcctcctctcagcacccttaattcagtcacatctttttccatataatgtattatttgctcctttgctacataaggtaatattcacaagtctcagagattaaaatgtggacatatcttttttggggccaccttttagcctgctataccattgtacgttgaaattctcaactttataattttctctttctataaataggaagactttttacaaaaagtctgtttcagataattctagtatctggaggcttgtgggtgggtttctatttctgttatttctgctggttttgtttatgtcttcttatctccttatgtgcttggttatttttaattgtgtgtgagacagtatattcgtacaattttttacagatataatttgaggtcaagattgaggtttctcaaccccagaagggatttacatttgcttctgcaagcacttggggcattagaattctggaagcatctgattttagtttcagatattgagatggcttgaagatgatccatagacctctgcaagggcctcttagttctctattctcccttcctgctaggacacagctctttgaggagcccagtccaaaacaaatgatacacctggtcagttcccccatccttagcaggacttaaacacaaatctttatttccttggctcctcaatatgtcgttaggggagaaataggcccagaatgccagcttcttttgtccagacttcttccttcccttgatcctggcctgacgcttttttttttttttttagatttgaggtgttttaaagcatttaataaatgctttttctctcttttacttatcttcaatgggaaggtgtattagtctgttttcacactactgataaagacatacctgagactgggcaatttacaaaagaaaaaggtttattggacttacagttccacagggctggggaggccttacaatcgtggtggaaggtgaaaggcatgcctcacctgcggcagacaagagaagagagcttgggcaggcaaagtcccctttttaaaaccatcagatcttgtgagacttattcactatcatgaaaacaacacgggaaagacctacctccatgattcagttacctcccactgggtccctcccacaacacgtgggaattcaagatgagatttggtggggaaacagccaaatcatatcaaaagttttatctggcatatctagtgagtcattatcagaagcagtagtctctctgaagcttttctcatctatccaccttacatttttatgattaaaaattccaaaaattacagaagtggagggaatagtccaaatattcccccatcactcaaatgcaactcttatcaagattttgtcacaatttgcatggaaatattcacaacctataagaagagaaagttttaaagcaaggcaatatctcaactcacagccatccacttacctctaatggccagcatcagagacaaagacttctgccttggttactgctgtcctgagcttctagcacaggtgtgcccctagatgatttcagtgagctattgttaaatgaatgtgaattcactgaagaaccacagactgtgggagctggaggaagtcttggcttgtcgtaatgaaccacagattacagatggagatgctgacatcctgagattaggtcacagaggtgcatgggagagttaggccaaggtctcaactcagggctctctccacttttccacacttcctcctcattttgctagctcatttaattaccactttttcttcctttctgataacactgaagtttaagagcatttcattacaagtgtgatgatacaatgtggtattaagacatgacaaggcaagttttattggccattactatttgcctcaagtgagtggcaaagcctttgaccactcgaggcatatattaatagccctataaaatacatcctggattgctagtgctattaccgtctggctattacatttaaaaaaatattgtacaaataccacttcaaataattttcttactcttttttttaaactggaacgattagctttttttatgagagacaattcttcacatgatggagaaaatagaattgtcaggtaacatggaaagagtataagctttggagtcgtaccaaactgtgtgcaggtatttgctctgctatttatcatcactgtgacattaggcacttttcttaaactctctgggtctattttcttctctgtcaaatgacaacaagaatgcttgtcttttagaattcatatgtatatgaaaacacctggcatagggccttgaacataatgagtggtcaataaatcttatatttttgttgttgttattattgtcatgataatgaaatccaatgggaaattttttcttttaattagttgatttatttgtaagactaaaaatgttgttgttataacagatccttgtcttgcagggcagtctttctttgtttcctctctagccctcatcccttggaaaaatgagctgaaccatgttggttggtgcaagaggggctgacagaagagagttttgataaatccacaagataactttggaaactctttgccattttccctcctactcaatgctgctgggactttgagctcgctgaggcagtctaaggctgtgctttgacttcagtgctgtgccttgtgcttgggataattgtgttttccatttgatggcccccaatgctttgtgtaggaattggatggtgcacccatgctcctcaaatgctgaagcagtcatgtcacttggtggggtgaggtggatcatcagcaacaacatacttttcttttctttttgaattaagcacacggaaaaatccataatctaaacatgagggacattaagttttggatggaagagagtgaattttgcaacaataacaactaaaaacccaggacacagaacaattattgaaaacaacttgctgaagtatataaataaataaaagtgtcatttctgaagtatctttccttccctaggctcactgccattgtcatgggaaaagtgtgcatggcagcatttactctgaggtaataacatggatacatttcccgttgctcaagacttgtacatagagtctgaagacaaattcttcctatcttgctgagaaattaacttctatttttccattcctgtgagccagaagggtaattaccacatgctgttcagtcatgagtttatggaaagaaacacaggcttcattcagggtcttcaccaactgggtggggttgggttggtcatggagagaacttacattgtgggtttacagctgtactgcaaacatttcttcaagtctggagcaaactcagcccctctttcctgactaacttcttccctgcctaatccaatgaagacaatggttgatgagaataatagcagttattgcatattaagtattaatcagacatgttattctttaaacacacttttgctttttttttttttttttataataatcaggcatccaatgagatctgtcctctttttatcctcatttcactgagaaggaatggtggctctgaagagttaaataacttgcctaagctcacaattttagaaggtatggccaagactcaaacccagattggtctgattgtcaaagttgtgttctattcttaaccaattttctactttctttggtaccatgattatctccttgccttataaatattcttgtatgtggtattatctttgtcttattattcatagtacacaggggctttttttcttcctacttgcatttccagttccttccttattaatcagtgtgagctttttgcgattgagccctcttttctcttgccccacccgccagcccacctcctgttcaaatacagccctgcgggtgaacactatgggcgacccatgtgtgtgggctcataggaagatgcaatgtggagaagaatggaagcttctatggcagatctacattcttttttctgtcctctccctctctctacacccaatgtactttattttttggcccatttttgctcctatatgccctttcatcatcctcagaacctgtacccttggcattttgtcggtagacatttatatttcctggcattgaggctatagatctctaatacttgaattgattttcaaaattagggaaaagagctgcgattttagctatatatttgggctgtttgagttgaaaatgatgaagagtaaagtaatgtttgctgtaagaggtgggaggcaggactgtgacacggtcagctgactcttagatgtgtaataatggtctggcaccaccagtctctcactgtcttcttgaaatcacctctaaagaagagtttgatctggaaggtcaagcctagcagtgaactgaagctgttctctctgagtgcatttattcatttattcacaaagcagttactggtctatgtgcctcaagattcctaaatctcattgagccaccaacccttttattgaaagctacaggctctttttttcacaaaaattcacagaatacataacatggttttgcatgcaatttgaagggattcacagatcctttgaagcccatctgaggactgccagccaggacccctagcttggtgcactacctttcttgtttaatcacattctaatctccaaatcaaggcctcttccattgtgaatagagatagaaactcagctcagattctttgatggaactgtgttcagccaagttgtgtttgctcatcactgaagctttaagagatggttaaagaaacaaggtaactgtgtggaattacttatgatcacaaaggcatctgtagcaaaggatcagtctttacaggagttgtcttctgagcctgggtatgaagggtctctaaactattttatgggaaatttaaatccctcgatcgaaacaaattatcataggagggaagaaaaagtaaatctcattaatggttaggtgtagtgggttaagtatttgcaaaagtcttggtcattttgaaaatggtaataccagtgcaatgagttctgaaatctgtagacatagtgtgtgtgtgtgtgtgtgtgtgtgtgtgtgtgtgtgtttctgaagaaaataaaaattttcacatctaaaataaaggctcagtttcctttggggtgccttagttcacagcagtatgacagctaaccagaaagctgccatactgtgattctgtttttatattatttaattagatgatttaaagattctctaaaaattctggtgcagcctttgtgttcctgggaggaatcttacataacttggagtcctagaatagaggaagagaacagtggtacccaggcctcgtttgctgttatggtttatgtcgcagacttgctaggtatgacttccaacaacacaaacagaaggtgacaggttacaaaagagtagataaaattttttgctgacttttctcctggctacactctccctacttcctccccattaagagtaatgggagagttcctgaactaaagttgcattgtgtttccatgcagaaaaccaaagactccccgtaagctgagctgaggtaggcagggcatgaaaccgaagggctgcaggtttgtcatttgttgttaagagctgtggcatatttggccaaaggggctcattgtctacagccttctgtaagttattctgcaatattccattcaaaggaaaagcagccaagttctgtttccacctttctaaaggctttggtggttcctgtccattgggtgtgtgtcctgccctttgcctcactgtctcaataaagcatgtgaagaccagcttcctctccggtctggcggatctgttctcaggctgagcagagagtggcaaaggctgcatctgcgttgcttgctcctggcattgcctgcctgccagggcaccacacaagagctcgggcttacaggcacactttgggtgaagtcattcttccctgaaaactgagatgggaaatttatcctgacatgtcagaactgatgaagaaggctaagcaatggctacctgagcattagtcttgggagtgtgttctttcaagcacaggtttaggtttgcccttctattgtttcttctactaacacattatgaaggtagatttccactggaaaaaaaagaccagaatttgaaaatgtaatagagtgcatattcattattaagattataagaaagcctttgagaggatcaggcagtgagctgagaattatcactgaagtttaatttgtttattggatatctggatggaaaccagcaggactggccatgccctgttcctctttcacagccctgcttctgcccaaagggctcattcaaattctttttcattctttcagccctccacatatgcggagaactctcatattttccacattcctttcttctttggaatcctgctctaaggaaagaaataggtcttggtcacctataccttttacaccttactgtgaatgtcaggatagtgtataacctggatattgatactcctggggcatttgagtgttatcgtttactgtgagttagaagactttgacttctttaaaaaggaagtagaagccatgcttaaatgctttcaaaaacaaacctgcacagtttgtgctttgccctatttttgaatcatttgtattaatgctgtgacattgtgagcacagtgtgtgtgagtcttgggagaagtgaggacctgcaaagttctggcttgccactaacctgcactgtggctttgggagtgtcagctccctgcatcactataaaatgagtaggttgtattaggtgatcaccagaggccctgctagacctgacagtccaaggataaagttgagtgctaaaggagcaggctgtgtagacagattgcaagtgtccaccagtggatggtcttggcacaacaaggctgcctcctcatggtctttggtcccaacaagttcaatataaaatggaggaaatgttataattttaagcactgataccagggtttccttagggggagaattgcctttgtgtgggaaaataccgtgataagacatttggagtagattgtgaaacactgaagacattagtgtctgggaacctaagccaaaaaagagatgattaatcttttgtacacaagaaagtaaaaggaatttgtgctttgttcagccttatgcagaggtagaaaagaaaatagaggagaagagacaagagaggaaagagagagaaaatctggaaagatggcagaagactggatgctgtgtgtcctaaaagccttagtaagaaaggcttagagatattaggaactgtaatgtctaatgtgagatattaatttagtttactgtgtgttttgctctctagtttctgtgacttaccaatctctaataactcaaaaatggtttttgagtgaattattttgtgaagactagggaaggcaatgaggatttttttttgcctagattaattggaaacagcttgtatggaaataaaatattacaggcagaggtgactagaaaacatagccccacccagaaaactgtagacgtcttagtgagaggtttgcatctccactggacatgcagtttggaggtctctagccaatgtcgtctagatcttccagggctggtcaggtgggaggttcccaaatgacatttttttttttcataataaaataattttattgatcattcttgggtgtttctcgcagagggggatttggcagggtcacaggacaatagtggagggaaggtcagcagataaacaagtgaacaaaggtctctggttttcctaggcagaggaccctgcggccttccgcagtgtttgtgtccctgggtacttgagattagggagtggtgatgactcttaacgagcatgctgccttcaagcatctgtttaacaaagcacatcttgcaccacccttaatccattcaaccctgagtggacacagcacatgtttcagagagcacagggttgggggtaaggtcacagatcaacaggatcccaaggcagaagaatttttcttagtacagaacaaaatgaaaagtctcccatgtctacctctttctacacagacacggcaaccatctgatttctcaatcttttccccacctttcccccctttctattccacaaaaccgccgttgtcatcatggccccttctcaatgagctgttgagtacacctcccagacggggtggtggccgggcagaggggctcctcacttcccagtaggggcggccgggcagaggcgcccctcacctcccggatggggaggctggccgggctgggggctgacccccccacctccctcccggacggggcggctggccgggcggggggctgacactcccacctccctcccggacagggcggctggccgggcagaggggctcctctcttcccagtaggggcggccgggcagaggcgcccctcacctcccggacggggcggctggccgggcggggggctgacccccccacctccttcctggacagggcggctggccgggcagaggggctcctcacttcccagtaggggcggccgggcagaggcgcccctcacctcccggacggggcggctggccgggcggggggctgacccccccacctccttcccggactgggcggctggccgggcggggggctaaccccccgacctcccttccggacggggcggctggccgggcggggggctaacctccccacctcccttccagatggggcggctggccgggcggggtattgacccccacctccctcccggacggggtggctgccgggcggagacgctcctcacttcccagacggtgtggctgccgcgcggaggggctcctcacttctcagacggggcggttgctgggcggaggggctcctcacttctcagatggggcggttgccaggcagagggtctcctcacttctcagacggggcggccgggcagagacgctcctcacatcccagacggggcggcagggcagaggcgctccccacatctcagacgatgggcggccgggcagagatgctcctcacttcctagatgggttggtggcggggcagagacgctcctcactttccagactgggcagccaggcagagaggctcctcacatcccagacgatgggcggccaggcagagatgctcctcacttcccagacggggtggcggccgggcagaggctgcaatctcggcactttggggggccaaggcaggcagctgggaggtagaggttgtagcgagccgagatcacgccactgcactccagcctgggcaccattgagcactgagtgaacacaactccgtctgccatcccggcacctcgggaggccgaggctggcggatcactcgcggttaggagctggagaccagcccggccaacacagcgaaaccccgtctccaccaaaaaaaatacgaaaaccagtcaggcgtggcggcgcgcgcctgcaatcgcaggcactcggcaggctgaggcaggagaatcaggcagggaggttgcagtgagccgagatggcagcagtacagtccagcttccgctcggcatcagagggagaccgtggggagacgggagagggagggggagggggagggggagggggaggccaaatggcattgttatggggtcttatctgcaaacgcagaactccattatgttttaatgatggatgagccatttttacaaatttgcaagattctagaagaaagaacaatctggaatgtgttcttacatacttttttttggtttattttgtttttctgtttttttttttccaagatggacactcagtgtgaatgttcttatgtactgttgattgtacctctaagatgatgtaatgacctcatctcatctagctgtcaacaatggcccccttttggccagaggttatttgactgcttcagagagatctggaaaacacaatttcttagttttatctgtggccaattgtacctctgtaatggctgttttgtccaccattgttttctgggatttctgaggaaaattctgagacaagtaactcctttgtttgtggaagttagttttggaaattacaaatgaagtatctttttttttttgagatggagtttcgctcttgtcacccagctggagtgcaatggcatgatcttggctcactgcaaccccacctcccgggttcaagcaattctcctgcctcaacctcctgagtagctgggattacaggcgcctgccaccacgcccggctaattttttttttttttttttttttggtatttttagtagagacggagtctcgccatgttggccaggctggtcttgaactgctgacttcaggtgatccacccgcctcggcctcccaacgtgctgggattacagacatgagtcactgtgctcagccagacaaatgaaatttctatcctaaaacagcatgcattacctaatcccaggtggttaaaaaaatgtatatatatttaatggttgctctgaaaaaatatagacagcatgggttccaaaatattaactatagtaaggagtcccatcatggttttcatagcatcctatcctgtacttgtacttgtatgttgttgcatttataaagattgaaattcattactaatgtagttggttatcagtttctttcctagaacagggagcacctgtcctgaaccaggtccagggtagtgtacatgacacctcagcaatagagtgattttctctagttttacagtttctacagtgaacatattatttttcctaattacaaaatataaatctctttaaaatgacgcatgcataattaggtactcagtattacttttaggaaattatatttgtgcaactgaagaaaagacctacatgggaagaactagaatggaaaggaacaggttgagggatgtatataaatggtaggtttctcactttgggaggccaaggtgagcgaatcatttgaggtcaggagttcgagaccagcctggccaacgtggtgaaaccccatctgtactaaaaatacagaaattagccaggcatggtggcttatgccagcacatgcctgtgatcacagctacttgggaggctgaggcgggagaatcgcttgaaccggggaggcagaggttgcagtgagctgagattgcaccaccaaactccagcctgggcaaagagtgagaccttgtctcaaaaaaaaaaaaaaaaagaaaaagaaaaaaaaggtaggtttctgctcttggatctaagtgctcgattgtagagaagatatcataaagagagtccaaagtgtgagttcatacccacaatagccagtaattgacatggcagctttgttttgccttcacttaaaatactggcatggtgtgtattttgttgtctgtccttcagaattggattttgttttttcaaggagaaaaatagatgagactgctactataggatcccttgttagatatattacatttcaggatatatttccaggcacttcgtggtggaaatctggctctcggagcttaggcttggttttgggatattttctgcatgtcagtatatttcagtatgcctctaagtaaaccaagtagctcctcctccccctcaacacctggtatgattcatgactgatttgggtagctgtaatttttctaatgtcagttagaagggaaagaatttaaatttactacatgccaatcatattccaaagccatacttagtattaaaaccacagaaggagtcatttacatttaacaggagctgtgggtcttaagcaatgatcatttggtaatgtatgttttgattttaggttaaaaagaaccttgatattgtgggatttctggttttcagatgagtggctagtagcctgtttttagaaagacattggggatgggaacatgtatttggcttctttgagtacagaaattctgcttcttggtggaccacagtttgactttgttttcggggttaccttggtgtaacaaagcatcccttatgccttcagggctgtccttaccacccatcacctgccaattggttcctgtctatgtcagtgttttgaatcagaatatgaggtgtgaaaaatacttcattcgattttagaccactcctaccttttgggtagtattacatttgaaagtttaggatttggccttgttcacttgtttatatttttactctaaaataggtgttaaatatattttgagcatttactgttgcagggcactgtactaggtactatggaattacatacaaactggagagataggctctgctctcattaagcttgttgtatgataggaaagaaggaaaacaacaatgaaaaagctacatagccctttcattgcagagtggtcagtgctatggtgtggacagagtgtcctgagggagtctaagtggaagataagttgagggagaagtggatagagagtgtgtgtgaccttatgcaaaggcactggagtaaaaaggtgcatctgtcattgaagagaatgaaaaaaaaagttcagggacaggagctcagtgagggaaggtgagtatgcccagaccatgaagtctcctgggctacagtgaggactttggactctatgagctaggagtgttctgcccacttaaaaaaagacatgtaggggacacacattattttatttgcctgaagcttgaccacctctcctttagctcccttccgcattctggaaaatgcttctccatttctgtagctccatggttaccatggaggcagccacgttgttttaagctactctgtgtcccaaccacagatgattgatccagggattttatttgattccttgggggtgttggaattggattataaagtgaagagctgttggagaccaagttctgtcaagcagcctaaagagcagagatggaagaatgaagcaagaccacagagagtatttaaagtaaaatctggctgggtgcggtggctcacacctgtaatcccagaactttgggaggccaaggtgggaggattacatgagaccaggaattccagaccagccttgccaacatggcaaaaccccgtctatactaaaaaatacaaaaattagccgggcctggtggcatgtgcctgtaatcccagctactcaggaggctgaggcagaattgcttgaacctgggaagtggaggttgcagtgagccaagatcttgccactgcactccagcctgggtggcaaagtgagactctgtctaaaaaaataaatgaataaaaataaaataaagtaaaatcaagcagagataggatattcctgggctctccacatgctccaggcactggttccagacctttccaacatgaatcctagtcttgggttctataatataacagtattcccctaaaaagttttctgtccccactttctgtttatactagccacaattagtttctgtcactaatgtaaaattattttctctatatgtgcaggtatttgtagatatttataataattttgctttagggcaatcttcggattgtaaatgggccttaaagcttcttaattcatggaaagtcaattatcctctagtttagtttgaggatacaaagggacaggagaagttaagctcatctcatatttcccaagaatgtaaatgtgatgaaagggaactttgcagtctaagcaaaaacacttggacaagataacttacggacttgagtgtaaaaacttaagaagtgaactttcacttgtagcagttctctctgatgtgagtcttgctagtccactcaggttttatttcttttagaaggtgatgcaaacagcaatattattagcttaaacctaaaatgtggtttatttaatgtaaccatgaccaactgcattttcataattctgtctttgctgcattatcagctggcagggttattcacgctggactagctctgagcctgctaattcaaataaacagtccttgccaaccactgctgagctttgagaaggtctaggctaaagatgggcaaattaaagacaattccacactgtggtaagataatcaactactctgattacctagtaactaagctaattgggaagcagtgtagtatatgggataagagcaggctgtgtggattcagacctgtgtgggaattccacctctgctgtctacatgctagatgacttcaagcaagttccctggtctttctgaatctcagttttcctgttgataaaatgaggtaataatagtacctacttcgtgggactattatgatttagtaaaataatatttataagacacagtaagttcttttttttattattactttaagttctgggatacatgtgcagaatgtgcaggtttattacataggtatacatgtgccatggtggtttgttgcacctgtcagcccatcatctaggttttaagccctgcatgcgttagttatttgtcctaatgctctccctccccttgcccccgactccctgacgggccccggtgtgtgatgttcccctccctgtgcccatgtgttctcattgtccaaatcccccttatgaatgagaacatgcggtgttgggttttctgttccaagacacagtaagttcttaagtattagcattattatggatattattttgtaaagcagttaccataatgcctagaatttgataaatgctatttgctcttttaccttaaaaatgtacctatccatatctttgaaacttcagtaagtaaatgtcttccctgatttacctgcctttgggcagcaggttaagaatccctgacataaactgaccttctcattttatagacagaaattgcaaccccaaagagtagcaatttttcagggttgggcagagctggtctggagcttaggggtctgtctcctaattcagtgctttacccactacactgcctatttcaagtgcagatgacctagggcattctttggctgcatcaatatgtataaagagacacatgatgcttgcaaaaggtacagttagagacttttacaaacccccaaacttgtggatatggaaatgcttatatactccttatttttccccaaatcatatttctataaggattctcatttcctgtgcacattccttttttatgtgaatacagttttcctgaagtatcttcccttgcttgatggcaattttttctttttgaggtggagtctcactctgtcgcccaggccggagtgcagtggtacgatcttggctcactgcaacctctgtctcccgggttcaagcaattctcttgcctcagcctcctgagtagctgggattacaggcgtgcgccaccatgcccagctaatttttgtatttttagtagagacggggtttcaccatgttggtcaggctggtctcgatctcctgaccttgtgatccacccaccacgacctcccaaagtgctgggattaccagcgtgagccactgcacctggccgatggcaagtttttacaaggaacctgagtttgtagtcacttcacaggcattacaaggacaagggaggaatctccaagttttattgccagaaagatgctgggcccttgggacctacatagctattctaaacactggatacatcaaccacagaatccaagtttgcatctcagtgaaatttcacactagaacatattctttggaattcctcgtgaataattgaaacaatgattgttaagtcctttaatgctaaatatttactctataatggtcccattctactggacattggtcagactgccatgttccattgagggtcgtatttaagagagctgtggccaaacctaagttcacataacagcatgcagtgaggatggaaaggagttctaggagttgagttatgtgagggatggtgtatttggcctgcatgggagatgaagaggagtaataaaaggcaccatcaaatattttaagtctgtcaggggaggagggattttatttactctatcatactggatatttcagagaggcatattttaggctgtttattttaaaaagttaggtgaaacttgaacaacaatagtaactataacaattaagtcttccagttattgagcatttagtgagtacagagtcctatgctaggtgccctccagggattgtaatccctgttttatagatgatgataatagatatatgtaatagatagatgtaatccctgttttataggtttgggaattggtccttaactggcaggtccgtgggactgtaaagcctcaggaagagcaattgcctccatcacagaaagcataagaggttgtaggaagaatagattctgtgggcacaggcctgccttgtattccactctacccggagtgcccagcactgggcctggcctctgccagtggtcagcaaatggatgtgcaatggacacatgaacagactctgcatttggtgggagctttgaattctctgactggacttgaaggaccttccaaagtcactgaccatttagatggaaataaaatatacatccccatcacttggctgttaaatataagctcgtcacagttaaagtctggcaaggctggactgggggaacagtggcagttcctgagagtgctgagggtgggattttccttacagttctattaattggatgtgtccagagtgatctcgtgtttccttgagaattgtggccacatactgccctaagtgctgctctctgcattttgtggcagttgatgggatatgatgagtttgtggggacaaaagactttaaaaggtctctgtgagaaatgactcctattgcctttgggtgagaggccaatttatcagaatagcaaatgccttatgttagtggcatactttgaacacttgccatagaatgtctcctttgatccttgatagataaagaagatataacccccattttgcagaagacactgaagctcagagaaattataggaattgctcaaggtcacatgaaattccaatctttctctgagctccagggtcagttatcacctgcctacttgataactccacttggatagctaatgggcacctcaaatccagcacgacctaaacagaggtcccaactcctgctctttctctgaagagcactgatgctctctgtttcagtaaatggcatcccagggaacccaggtacattagtcctattgctgctgcaacaaattaccaccgacataaaagctgtacaaatttatgatttcacacttctggaggccagaaatctaatgtgggtcagctgggctgcaatgcttctggagtcttcagaggaaactgttgtcttgccttttccagctcctagaggcttctgatattccttggcaagtggcttgcattactctgacctctgctttcatcatcacatctccttctctgactctggccctcctttctgactctgcttccagctttcccttatagggatccctggaattacaatgaggttcacctagatattccaggacaatccccccatctcaagatctttaatttcatcacatctgcaaagtccctttggcatggaaagtaacatattcacaggttttggagattaggatgttggcattttgtgggccaatcttctgcttactacaagggatcacccgttgttctttcatccagtccatcagcaagccctgctgggatctccaccaccaccaccttacctgccaccctcactcacctgggctatttaagccaaaacatcccatctcatctccctgcttccagccttgcctccccactgtctgttctctgtatagcagcacattaaaaatgtgggtcaggccaggcatggtggctcacgcctgtaatcccagcactttgggaggctgaggcgggcagatcatgagatcaggagatcaagaccatcctggctaacacggtgaaaccccatctctactaaaaatacaaaaaattagctgggcatggtgatgggtgcctgtaatcccagctactctggaggctgtggcaggagaatggcatgaacctgggaggcggagctagcagtgagccgagattgcgccactgtactccagcctgggcaacagagccagactccatctcaaaaaacaaaaaaaatgtgggtcagatcacaccactgccctgcacacaaaccctccaggaggtttatatcatactcagaaaaaatgtacctgtattccttctaatagttctgggccttactgtctgcccttattggccttacatttctgagctcctctcttccactctccgcctcactcacgctgttccagccctcttgccgtttaaccatacctggaacatgcctggaatgttcttcccttagacatctgcatggctccctccctcccttctttcatgtctctgcctaaatttagctctgcagggctgtcttccatgtcaccctgcctgacctgacactgttttattttcccatccaagcacttggcacgactgaccatgtattgtgtatatagtgcttgtaagtgtatcatctacctttctccctcagagggtagttccatgagggcagataatttgcattttctcagaaactggaatgattacttgcgcatagtaagagctcaatgagtatgtagaggaaacctgaagtttaaatctaggtcttctggttctgggtagaatgtgctcttctctcccccatgcgttatcttcataggtggttaaagaaaagtatgattttgtaatatcagcgaagtgtttgttttcctaacaccttccaaaatatcagtcagcacaggtcaaacatgcccctatgtctgctcagaggcaggcaggtgaacaagtgaacagctctctctctctcaagccaatgaagagccgtccactctctggcaaagcactgagctatttgctgagagtttcccaaggtgaaccgaagactccttgaaagcctccttcactggctatgcaccacttgtaattatgtgcacacattttgtaaccctttcatgagaggtgggatcgtgcatatagtgtttgcatatcccagaattgctccctgaccagcacagctttttgggtaagtttaatatgggggtgattatgcttgagaatgttcactggaccacaaggcacctcccatattctggagatgtgtgtgagctgcaaaaggggtacgtgagctccaggaacaggtagcatcatttccatcagctcagccagactctgttgtgcatatgcggcatgctgaggattgagacgagagctacagacacaaagctcaaacagctccagttgttgctctggaggagcttgtagtctgcgtcagtgctacttagagtggggtctgtggaccagcagtatcagcatcacctggacatttattagaaatgcagaatctcaggactcaccccagatctcttgaatccagatctgcattttaacaagatgtccagtgattcctctgcacattaatgtttaagaagttttgctggctgggcacggtggctcatgcctgtaatcccagcactttggaaggccgaggcaggtggatcacctgaggtcaggagttcgagaccagcctggccaacagggtgaaaccccgtctctactaaaaatacaaaaattagctgggcatggtggcagacgcctgtaatcccatctaccagctactcgggaggctgagacagcagaattgcttggacccgggaggcagaggttgcactgagccgagattatgccattgcactccagcctgggtgacagagcgaggctccatctcaaaaaaaaaaaaaaaaaagctttgctatagggaaagtgacaaacacataagcagataattactgtgcacaatgagattgtgttaagaatgggaagagtaggaagcacagctgcccagagaggagcgtccactctaagtgagtgtgtgagtgcattttttgtgtgtggccagtaagggggtaggtatagtgcttggtcaggaatagctggcagaatgaggtcatagctgaggtaatgtttgaaggaaggagtaaatattttaataatagtaatcatagctttcacctatcgaatactgaataatagtgtaacaaataatagtaaacacaagtagttcttagcatgctccaggcccaggcctactcattttaattttttttttttttttttttttttgagacagggtctcactctgtcacccaggctggagtgcatgatctcggctcactgcaacctccacctcccaggttcaagcagttctcatgactcagcctcccaaatagctgggattacaagcacataccatgacgcctggctaatttttgtattttttggtagtgataggttttcaccatgctggccaggctggtctccaactcttgacctcaagtgatccacccacctcagcttcccaaagtgttgggattacaggcatgagccaccatgcccggcctcattttaatttggaatgcatttgttttaaaacattaactcattttaatctttacatgtctaaaaatgaaaagaaaagaaaaggggcacgcagaatttagtggaactcccgactacgattgctggagtgccaggtgagccccagctgggcaattcaattcatctcgtgcctgcccttcctctttggggagactgccttgctgctgatgaaatggaggtagagagctgtgaagctgagtcccgttagcatccccgtgatgaacaaatcatgcgcattctttcaaggtgatgtgaagagatgactaaaaggttttgaaaagttccagatagaaatcttcttagatggcattgactgggctggggaggggcctgtttctgtgggtgagttgcagtcctccctacctgaccttgcgcaatgtagtctgtccctggttggggatgtgccgcactccaccgactgcatattaaaaagctgtattgacttattcctaacagggaactggctctgatttccatttcacagcagctgtcatctgctctactcttcagcaacaaacacggggtcagcctggccccaacttttttccctcttgtgatagtgttaaaaagctccctaactgtcccagtctttctttatgtggatttgatattctgtctgctacctaggcctttcagagacctccttttgatcatctatttcttcaggggtttttattgttgaaataaaacttgggggtaaaatatttgtatacaactattaatcttcattgtccaatatggtagctactagctgtatgtggctctattgagaacttgaaatgtggagcatctgaaccagatgtgctacaagagtaagatacacaccagattacaaaagacttgattaaaaaatgcaaaatatcccattactaacaagaaggtaaaatagctcattaataatttttatattaactagtgaatattttggatctattgggttaagaaaatatatcaaatttaatttcacttgtttctctttactttttgttaatgtaactactagaaaatttaaagtttcctatgtggcatgtgtttgtagcttgcattacatgtctctggggcagcctctctctaaacccatttgaccaggagcagccaacaaggtttccatctgctggaatccatatttagagtcaaaggtcagtcagtttaattccacacatgggatttttccctcaccccctcctccttacctgttccctggacctccttatcggatcttgttcaggttttgggcactgcacctattgattgatccctcagtggctgctggttggctctttgtcccaccttcaccatcatctggtctttctgggactcctcagcaggctcctctgggtgggctagccctaaatgtgagtgatcctcacagttctgacccctcctccacctctctcccctctgctcctcttccctggtttgggactcagattcacattgaaccttttttaactggcagggcaagcctctgtggtccatctggaaagaaccacaaagcatcctttgtcatcctgttttagtatctagaatacactctgaagatcagaagcagtctctctgtacaagacatgtgtttcccatcagcagacagcagactcttttgtagctgggttcaaaatctttgttgttgaccgcttctggcatcttagcttttgtgaatctggggtgataccttttggtttccctgccttttctttaacaccagatctccttcatcctgatgcatttttaaacaccagtcaggatatgccatttatgttcatgctaaagtcttcactgacactcaccacaccaatctacttttattcccagttactatgttagaatcctatttagatagatggagccaattgagcgggccctgcagaaagccatattcagttagtgtaaatcttcctgctggtgttggagacagcaaggtcccctgggattctgtctggaaatcttattggattttcaagacttaagttaatatagagaccccccaagatagtatagggcctcatttctttgccttgaaagatgtttttagaggtctgtctcaagagtctcgctgataaggaagttacttcaaatatttcaagagaaacaaccacaaagagtcttctattttctcaatattttttctctccctgcccgtccatctttttagtattttttaaatgcctgccctctatatttatttccctctttctctcatgcactcattaaccttaggcccctgtttcaaatggaattaattagtaaccataaaacttggtaagtgatggccttaagggaaaagtctttctttcttctttctttctttcttttccctccctccctccctcctgcctttccttccttccttccttccttccttcctctctctctgtctcgctctctttcatgacgaatgaatataccttgtagacataagtgaatacatttcatgatactgtacttttttcttttcttaatcaagtgaacatcttccttagtgacatatagggtactgtctcctgacttttgctctgagacgcagcactcagcagaacagagtgtgggctttggattcagagccataagtttgagtcccagctctccctttatgctgggcaaacagtgtcgctcttctgcagttccattcccatgttagtaatataggcacgaccatttctgccttgccatattgtgttcagaactaaaggtgattgtgcatgtaaagtgcctcactcccagtgggctttcaggcatccccaggtgctgcgttttattcagttaaaaaagtcaaaggaagagtctaaacacctcccaccagggtcgttgataaatatcttgtctcagccttcttgagtccagcaaggatgtgaatgtcataccttcagtaaactagattttgtacttctagaagacttttattaggcacataagaaaatgatgctaacaaagttcaaagttgctccgtgttgcagtgatcttttaaaagggaagttttgaggtagttttgaagcagatttctggaatcatcttcaggactttcgtgagctcattgtaatgtgttatgtgaaatgcatgtcctcaaaacatgggtggttgtataaatgaggaagctggcctcatggagccaaagcagcatggaaaggcccaaataacttgctgtggggaagactgactgcctctggggtttttaatcagcatgaaaagccacccagggccccaaatcattagtagcattttaattggcagcagagtaatactgtgtctactttggcttaaagatataaatttcctgctctctcataacagatggtgatgaggtgcatggtaggaagcatggcaagaactgtgttactcaaaatgtagacttaattgcaaatttgaaatggaaataaagtgaaggttctgtctttatttacaataaatttcatgtgttaaatggacttgtctaattcttctattttaccatgcgattgaataataaacatttattatgtgcttctggcatgcactgtgttaaatattttacatggattatgtcatggatctcttgccatgatcctgaggaaagtattattgctgcttttagtagcatcgaatgttggaataaagtctgcaggggcagctggtaatatgtcagcaatgtctgtcttctgagatgagacagtgataaaagggctgactgcccacctagggaggcagtctcatctctcattagtgccaggagccatagaatgtgagcctggaggctctcaccaccaggtaggtgaccctgtgcacaccctcccattgctctcatcacattagaatagcatctgcagtctttactctcacctttaaggccctgcatgacccagcttcatcttctgctattctccctatgttctttttccttcctctgcttgatgttcctatgtagcagttattcctacctgagattatgttatgtgtcaaacaggaagatcaggctgccaatcccaggtggggattatcaacctgtggaggatggcaaagagtataacaccaccaatcacgagaagtcggagcccattgaccttggcccctgcattgcctatgggcttggaatccccaaggagacctcagcatacaaggtgcttgttggaacaatgctttattcacagaaaggagaaaaggcacagcaagatcagcatctgcagcacgtgccagtctcccatggttagcagaactctccagataaagtggaagactgtacccaggctgctctactgcaggagaacaccccgttccctcctcaaggggagcagatatacaagtggactggccaaatgccatatgatgaatacacttaagcggtagcagaaagttgtgtctccagaacaaggaaaaacttctcccagtgaggaagaagaatctaggagccagtggcaactccagatgagggaagtttcctggtccaggccactgactgggcaatcctggggagggatgacaggctgagcaatggctgcttccccgacagcacatccccagaccttcatcaagatgccaggacaaaaacctcaggcatgtcacacccaacagaacaaacagctcccccaaatatggagtgcttccatagtcaccaccgaagatggaggtgttttcagcatggtcctagaatgagtctcatggctccctgcccaactgagatagcactttgtcagggccagtccaagaaagatgatcaggcctccctggttctcagccctgagccccaggtgctgggatttagtcagttaaaaaagtcaaaggaagagtctagtggatacacaggtttacagacaacagccaccctgtttgaaggtagattgcttttcctgaatacttgatgtacacacagcaagatacgttggcaatagcatggactctgccctggagagtcacccaggccatctgtcctaacccaagggctaccacctctgcaggaacacattgctcttgctgtttccccaaacctctctgccctgatcatccaatcgaggcagtgaggttatggcttgtacaaattttgcgtgtcctataacatcacccacctgtacaggggagttgggagttcctgatgctaccagggggattttggtattgtggtgttttatgaccctctcctttcctgtggggtcccaaggaggtgaacaacctagggcagcataacttccaagttagagtaagggatgggcgtccctgtcaggcactaccactgcagggaccacagaccactccgggcacagtgttccagaaggagaaactaaaggagtggttgggtacacagattgggatgcctcagtcacagcctaatcaggtgactgcctgctcctctacccctgccaaactcaggattctccagtgtggatttcagtgccgtttccctttgtctggagtgcagtgtcaagagtccaaatggccccagtgaggtgagggtatcaccctgttaacaatccttctttacgtcccttctttaactgttgatttagtcttccattccactgttctgtggctctcttagcttatgggtggtgtgaatgtgggaggtgcagcatatgccatgggattgtgtccattgttttgtggcttgtgctatcaaagaagtgccctgatttgattggaattcagtagggtacccaaactcatggcaaagattttttttccagggcaactatggtggtaccagcattcacatgcagcacagagatgacagttctaaaccttaagtaggtgtcagctgctgtgaggcaccagaagaatccatggccgggtgttaaagatccagtgtgatccatctgccaaacgagcctgctgatacccctcacgataggtcatcattctcgtcatactgtttgggctgattggtgggaattgcactgcattcttggcttctgtgtcttctcggattacacccatggatttggcccattcctgcatttgagatgggattccatgactggttcattaaggcacccagcgtgtggcccttccaacttgttttggacaggctctgataccttaggaattccccttgtgttcttatttaagaggcactttgctgggagcatatacatgagtgataaagatttgcctatttcatgcagcaaacttgccatagtccctgttcccacacagatttttaatagttcagtcatgtagttgccagtctcctgacgaaatggctagaccaccacccaggaattggcaaagatgtagcaaggtgtgtggggtagggtggcttgtacaccattaccaccacatgaaattcagccccgtgggctaattgttctcttccagtttcaggtaagaatggctctccatggggtgggtggctgtgggggcacagtggactccatcaactcattttgcagaagcctgggtaaactaggccatgccttcagctagaacctcttcaacatggcccaggtgactagggaagggaccagcactgtgctccctctggcagggtggccacctgctcatgtagttgaccccttggggtcctggcctggctcagtcttagatgtaacatttccatttgatgatggaaccctcctgggcttttccagttttattagtgagattggtgaggacccaagtaaggatgagcacttgaggcctcagaaccacataatgtgctttggtagtgagatgttcagtctccaccagagcccaatagcaagcaagaagctgcctatgaagggtgtgtattgggcagcagcttcaggcagcttgtgtgtccagaatcgcagaggttgcaccccgctcagaggtggttttctgctgctactgactcagcatgttgggtgctgtggacatttgaagtttcatgcaggctccaaatatcccactcagagtcagggcctgggccatggcttgttgaatagttttcactgctcattgctgagaagtgccccatttgaaggttgctgtcttttgtgccaccttgacaagggggccagaaggatacccagatggggtatgtgttgtctccagtgtctgaacagatccaccagctgctgtgcttctattttatcagtgggagagccaggggctgtaacttctatttaaccttctccgtaatactctgttgattttatgctcagatgtccctgagaaactgtacttgttgggtgggtccttgaatcttatctggatttatggcccaactggtgttagtcctcgcattggtgatcgagcgaaaagccaaggccacttgttcttcagtgggatccacaaagaagatgccatctattaaacctgacttgggcttgctgtaaatcaagccctacccattgctgacaaatggcagggtcatgaagggacccctgagggaagacggaaaaagtgtattacaagccattccacaggatgcacattgatcctggtcttcttgcccctgggaaattgagaaaaaggcattggccaagtccgtgacagcataccagtctccagaataagctgccaccgactcagaaaaacgggatgatcgccagcactcaggggccaaggcatttggcctgcaatagtccaagccagcctctggggcacggaggctgatgtagtctctcagtctccctgtgttggtgacctttttgaccaggatattaaattgtgacaaagttgtttgatgcactcctgcttgcaccaggtaatttattcttgtattaaaagagtaatgtctttctttccacaatggataggggcttgggcaattctggaaggaggaagaggaggagtgtatttggcccacatggcttaaatattgctctgggtaggtgcagtgcatattcctgcaggtgaccctggttttcagtgtcatggctaccaaaatgtcattacccatagcacatgatgcaaggggtaccatgatcattgctgccgaaatggtcttgcccataagtacatgtttatttgttttctatgggctaccatgccctccccaaaaacacacaatgccaccattccactcctcccttgtgggggcttggtataataatcactaagcaacagtgtctcatagccccatgcttgttttcatactctcccccacttccatatttcccgtccacccccacagggcacagagctgcaggtcactgtgggagcgtggagcctttggccctaccccaatcattctttttaaaaggagtcagaatataggtagcacagctcctcctctttatctgagtctagctcataattggaaccaccattttcctcactatctgagctgggtattgggaaactccagcagcagcttgccttccctccagtggggaggaggggggagtatctgaatcttcaggggggcaatccaagactcaaaatccttccaatccggtgagctcccctcttcctgttccttaatggtctgcatgaggtccttcatctctaatttagggggttctctttcctctttatgtgtggacaaaggtcttcagtggagactgcctatctgagtcttatctatcctttgtttagaagccacaaccacattgcactgcacacgagtcctgcccctctgattgtctcccttttgggcccttggaggaccacttgtagaggtctctactgctcaggtctcatccacagctacagtggcttccaccttgcagctccctccatcagatgatgggacatggcagagatgcgtctccaccacctcgctcattgtcatcccagggacagaagaagggacaaggaagtcttccattgtgggggatcctgcctcttaaaggcctctagggctgtacaagataggacagcttcatctacgtcctgtctgggggagggtcatacagccaggtgtcaatggcctttatcttaatggccataatggttttctgaaccattttccagggagccttgcttccaagaaattcccctacagtagcatacactgtgattatgcttccagtcacccaaaactaatagtggcatcagtttgtctcggtcaggtcctgttagttattctctgtgatgtaggtgaaaatatgctatagtagggggatgggttgtcaacttccccaaactacatctttctgctggagtcacttgggtctgcaaggccccctcatccatcaggcacaccaaccaggtagcttgggactctcctggcctctgcccacatctattctttaatttccttatcttgctgccagaaattgagcacatttccatggtttcatcttcagggacaccattagtcctttggcattgttggaaaatggatctcatctgcctgtggctgcagagcctcactggttggagctctgtcctaggggccttcagtctgcattggagctcctaattgttgagccatcggtgtatcagcagtaaagtggccagcagtcaagggatagttttcctgctcgtcttatatctccgccatgggttccaccccctgtctctccaccatatgacccattggcccaagtcatcccagtctaagggaagatttggtaaatctcatttgtccacctatatccagagagtggccaaaatttctgccagctggttacccgctggagagctggggacagaaacataagcccttgcttttggtgagaccgcagtaagtatctttggcaaacctgctgacttccagaaactgtgcagcaggaagatccagctgctgatctcaggggaggattccattcatgtgtaggacagcagagagcatatattgttgacttccaggaggaggatcccacagacttttgctcactgcatcttctacaggtttggagtcaccaagaaggactccatgcacaagggctggttggaaaaacactctacttacagaatgacaagaagatgagcccctcccgataaccaatgcagggtgatagcctgcatgcagccctttaggttacaggcaacgaccccaatcccagcactccatctagtcatatagataagtggagctgtccaggagccattgacacatgtttaagcagtacaaggaaattcaccgtatacccagaacagagaaatatttatccaaataaggaagaagactctgaggccaaggaatagctggacacctggcttctaaattagggaatgtcccaggcccagggcactgattaggcaatcctgtggaatggcggacaggtcacaagatggctgcttcctcagcattatacactgtatgtttatttcttttcttcccctatacattctccagaaggcaggtgctttgctcacagctgtatccttactcattgaaactgagtaatgtctggcttatagttggcactttccatataaattgttgactgaattgagaatgagtaaatgcccttcaccttttccaggcctgaagctcctagtctatgagatgagggcactggacagatgacaccggagttatcctccagctctaacattctgtcactgccatgctgtggaggggtgtcacacatcagccagtggtttaaccatgggttaggagacaggtcagagacaggattgggctttttcctgctcagttttcagatgtcccttttccctcatcttttcttccctgtgagtcccttaggtgtgagcccctctagaggtggccactgcttgtttcctgtttgtgccctcctgacaaaaggtgcagcacctgaactcctgcatgggtagtgttttaccagctctggggcaatggctcttgccttgtgtctgtgtcatgaaaagcactgtcttcagacagactgtctctttcaagaacgctcaggctaagtaactacctgttactaaaactataacattttgccattataaaagtaatactttctggccaggtgcggtggctcacgcctgtaatcccagcactttgggaggccgaggcaggcagatcacctgaggtcaggagttcgagaccagcctggccaacatggtaaaaccctatctctactaaaaatacaaaattagccaggcgtggtggcatgcacctgtaatcccagctacttggagggctgaggcaggagaatcacttgaacccaggaggcaaaggttgcagtgagccaagatcgcaccactgaactctagcctgggcaatagagcgagactctgctcaaaaaaaaaaaaggaatactttcttcttaaaagtaaatttggaaaataataaaaaacttgctaatatgccctccatacaaatgtagcatggctaagatttagaggatttgttcctactctgttttatgtttgtttgctttattgcacaaagtagtgttttgcatttgtgttaatctatatttttttaacttagtatgtaagtatgttccatgttgttgtgtgacttgctttaaaaatgaaccaaatattgaacatctactgatatgatggaaactgaattgggtatttttacataaattagctcatttactgcagcactctagtgaggtggacattattatccctattttgcagttgaggaaacttaaggctcagactgtttcacctactcagatcaaatagctaataaggaccaaagtcaaaattcattggacatggggctgacttgaaaagcctgtgttcttttgggtatgcattttactggctaccaaatatcccatctatcatgccatgttgtgacgcaaatcgaacatcaggtgaggggccccatagtggagctacctgtcacccaagataggatttctcctttcaggcaacttcttcaaagcctaattcagcacacagacatcaggtagaaaggtgattatttcctgcctggataggtttccacccatgcggctctcctatactcttaggtgtacattattgattccaggagtcatatgtgtccctatctgtgttgtgggtaaggagccccacagtcttttctcttgaaagacttggctctggctcagctgtgccttgaatctgtgattctgtcgcataccccaggcttttctgctcaggatggggcccttttgagaccaggtctttggtgcttgctcatgtgcagtctggaatcagctgcacagggctgggaagctgcaccgcccacctctaacaggctcacagcagaattcttaacacaggtgctttattttagaagtttatactcttcattgtaaatagctaataaaaagcgacagctacagcccatttataaatgcacttccagaaaccaaattcaaagggtttactaaatggcaggaacctggtcaacagctgttttaaatgcatttatttctgtcgggaggcaaatgttctacaaaatagctttgttgtcaatagtctctttgttctttgatgtacagcttacaaataaatgcatttataggaactgctaatgtgtgagggttttgatattagtgctaaatttgcaatctataatatatcatctagtcatctttgacaaactcaattgtaatctaattaagtggcgtcttctgtgattctgagtagagatccctaaggtaattctatcctacttggttttcacaggagaaaaaaaaaatccctaagagtactgttcaacaaagtgtgtgtatgtgtgtgtgtgtgcataaaatattccttttagatgagcaaagccaagaagatacctagtaataaatagctttcacagttggttaaatatcagaactggggaggcatttgaccccgaaatcatatggcatctctagagcatggcaactctgggaaactgattgttgcttaaagaaagtttaaagtatttgggaagtaatttctcttttatttttactcccttaggaagatttggatttgcagcctttatcactaacttggtgagaatttttttgtaaagttgtcaaatctataggcctcagaaatggcagttctcatacaaatcccagtaacgatgctaacatcattcatccagtgtcagtcaatcctaggtgcttgaaaaacatctcatttagtctttacaatagcttatgaagttgatacttttgtctcagtctttaaataagaaagccaaaactcagattggtttagtgatctggtcaatattacagagccaggaagtaagaggaggaattgaaaacaaggtctgcccgcctgggagtctgtgctgttttaagtcactttactgtcccctgctctgccacactgcctgtgttttcagagaggaggcaaccactaggctaaatgactatctggcaaaaatctatgtggagttggttcttcctattatattgcatctgtctgggacacctgagtgtttgcagagattcttgccccgattttcagcaccctcagctgttagccgtgctatggatgtgatgttggggaatttctaagattgaagtggccagttgcatgtagatgagaagactttctttaatttgccctaagtagacattctgcgcagtcagtgtgttatagaaagacatttctgggaggcaggtgatccaagggatggtggtcaagaagcacagaatatatagagatgggatagaaacaaatgcaatgaaagatcaggacattttgttcaaagtagaaatttcaagtagggaatcttcctcccacctaccgtcatgaactccaaggagattatgatttaataatccttgtctttatgtgtattcttcagtctatgagtaaaacatgttactggtttctcttctctgtaagttgcagtcatgtccctgcaagggagctagtttgtatgtattgctaggggctttaagatggtgattctccaggctaggaacccttccaagagattctatcacttacccaaagccgaaacacttgtccagtttagcaggaaatatctatatgattttgaatttcttggtttcggccatttgtggctctgaattcactgttgccctgaggaagccatctctgacccaaacactccttgttaaaccactggcatagctcaagtgacttggaaacctcactgtaactactattgcataacttcaacaacaaaccttcattctgttgtggtaaaacttcgctctatattcagccacacattaattagtacttatattttcttaaatgtacactgtgcatcatgacatgtcctcaggatatggagataaaatacttcatttttgctctcaaagacctaacagtctagtgaagaagactgcattctgaagtctctgaatgtcaaaaagtgctggttgaaaatatttcatttttttgataaacatgagaataggtaaaatcattttcagaagggcttatggaggggagacatctggtcctttacaaagacagggtcactgaacccttagtgcttttgtgaggtgacagaacacagtgtccccagagtgatgtatttccttgaaagttttttttctttgagaacatagggtggggttcttcctgaggaaaatattgatattgccagcctgctcctggtgaaattgaaaaaaaccaggaaatttaaacaaaggcatgattcaagaccaatatttaggaggaagcactcaccacaggaccagaacctgacccatggacccttgtactctgcatcgctgcagttcccatgctcttcccagcacctccctaaaatgggtcattctatgcaaatcccaacagccttccaaatagaatgtcactgccctgattaacaagtatttgtatactttttctctaaaatgtctacttgacatatcatatctttttgtatgtttcttccagcttctatttgttctttagaacttcagtagagtgcctttttacatttaccaaacaatgcaaaggacttccaggtaagtggacccctagtaaactctccagtgggatagatgcatagctttgtaatggcagccaaaaccagtttgtaaagatctcattttccccttttttacccctgagaataaaaggaggagtttaaaaaaatctatgcactggccgggcgcagtggctcacacctgtaatcccagcactttgggaggccgaggcgggcggattacgaggtcaggagatcgagaccatcctggctaacacggtgaaaccccgtctctactaaaaatacaaaaaattagctgggcgtggtggcagacgcctgtagtcccagctactagggaggctgaggcaggagaatggcgtgaacccgggaggcggagcttgctgtgagccgagatcgcgccactgcactccagcctgggcgacagagcgagactccgtctcaatggaaaaaaaaaaaaaaaatctatgcacctacacatacatgcacaatcacacaaacataagcacacatatatgcacacttaagcacacagattcacacatacattcacaactcatacatacatatgtatatatatagcactcacatgctcttacaaatatacatataaacatatacacatataaacatacacacatagaaacacacacacatataaacacacacacacacagttgtacatggactgtttcttgggaagaaatgctcattcggcaacagtggcttctttttctctctttgtggatttgctccttggcctttatccctataggaagccaagctgaaagcttttaaactggtatagcttttgtcctgacacctatgtctgggtgacatagattctcagagagagggagagatatgaaaggaaaaaagtctctgaggaaatcgtaatctttcccgaagaagttcttgcctagtgccaggtttctgggctcagagcagattagcgaaacaagcactcagctaagagtccagggcctggtttctagttctggttgtgaccctaatcagccgggcaagtcacttatgttctctgagcctcagatttctcgcctgtgcaatgatgatctttcagattctaactctaaaattctgtgcatgtctcttttccagtgactgaggaagttcaaagtagaataggatggggatgacacatgaataagctctgaatcctcacctgtctcgaggaggaataaattcaatcctaatgccaaaacgacagaatctctttacttcctcactgctttgccaaacgctcatttagatgtatctatcaatcactggtttattcatatggtgcctctcaccgtgaaatctaggttctggaacaatataattggcctaattttggttttctgactgcagaagtggatgcttcctctgcctgtctctactctcagctcttattgttttttttggtgaaagagattaatccaatgctccgtggaagtagatatcaagaactcttgagcagagagaagttttgcattctgcctgtttgacatttacaaggtatttcattaacactgtgggcgattcaatccccttttatttttggctgcccttgctgtgcctctgaaggaaggaaggccattcttttgccaggtaaggggcaggaaaatgtgtgactccaaagctacctggagcctgatgggggttaggttggtccttgctgcccctgctggtcacatggtccctgcttactctgcttgccttttgtcttcctctttgtggactcctattgatccttgtacttcctctggcagagtgtttatcagattatattgaaattgcctgtttacttctgcctctcccacagaacagtaaaaacctcaaagactggggctctttctttctttcttttctttctttctttttttttttttttgacaggttctctctctgttttccaagctggagtacagtggtgcaatcacagctccttggactcctgggtcaagggatcctgccaccccagcctcctgagtggctgggactacaggcatgtaccaccatgcccagctaaattttaattttctaatttttttttttttttttttttttggtatagagggtcttgctaagttgccagagtgatctcaaactcctggcttaaagtaatcctcccacccaggcttccaaagtgctgggattataggcatgatccaccgtgcccaggcttgttttttattgtacacttagggacttgcctatggtaggtactcagtaaatgtttcttgaaataattaatgacttgggttgatttggatgaaagacggaatggacggagggcattttttagtagcctggagacttggtttccatgcaccatgctgggatgtccctggcagcccatctactgagctggcaccagcatgcttaccagtctcctttgtgacagtcccaatggatatttttattagccagcatgatttatttcataatgctgagttgcagcacccttcatggctagagatttttgctgtggagataagttcttagaactatctccatttccagaaaagagagggtttctctcgtctgttgcccagaaaagaagtcagtttacgtatgcatcttccctgggtcaggctaagaagtagccccagcactggcatgctagacttggagagtctaatattcttccagccaaaccctgaagcaaaccacacctcctaggtcctgcaagtccccattaagtgtgcttaagtcatttgaactcctagagaatccatgtcagaggaggagaatcagcattcaacaaaagatagcatgtagtttttttttaaaaagtgaaagactaaagcttgccttttctatagatcatcaacatgtttacttatagcaaaaaaagcatgtacagatggatttttgccatttaaatcattcattaaaatccctattttaagccaagatttataacaaagtttttggggaaataacacatacatcccctcccatctggaaatgaaaagaacaagcaaaatggatctagcatcttcattataatagcaccttagcatgtaattcagtctcctcatgacaaccattatgtaaggataaggagaggctctgcaagccacccatttctacactgccctagagttgagattcaaccaagacccctgcttcggtttaggtttcaatatacacgtgaagacagggaggaatatactcacaagacaaagtcctgtgctcattggcacctgatcaagtgctaaggcttcagatgaaaagggcaacagaatctccagggcaaagggatcagttagtggaggattctttagagaggagggaagagaccccctgctgggccttgggggatggagcatttagtcaggaagatgacatcccagtaaggggaagctacccctaaaagcaaaggtatggagatgggagggaatgcggagaggggtggagaaattccatctttgttagggcagcagtcaaggatgagtgagttagcctcttaaggaagaggctaagctgttagaataaagaggtttacaacatcagcggcttaaatcaaatagaagtgtgtttctctttcacatgacagagtagatgtggcctggcgtctagaaagcatatttgtctctgctccactgtgtcttccagggacccattcttctcttgtcttcatgctccatcacttcctagggtgttgtctacacctgcatagccatagctaattttccattctcagcaccaaccaggggaagaggaggaaaggtagcctccttttcatgataggtgtgaagttatgcaggacactctcagggtgaatggaccacagtgtggctcctgactgggcagggaggaagaatctgctgctagagaaagaagggaagacagtcatctttgacatcatgagttgcataagatgggaataaaaactggaaaagacctaaatcaccatattagaaaactctagccattctaaagacattgaagaatcctgtttggacctttttagcagtgaggagcgtccagctgtggttatctggagaatgcaataggcagaacttgctggtagaggccccgcttccttgtcttgaatgcctgcctttttttttttcttttaaatttttcatctgcttctggatcacattgctgtgagccacattgggtcaattcacatggaggattagatctgggcacaccgtatcttttatgtcttttatttctttgactttattctgctggaaagtgttggcccacagccagaaccggcagagggcaaaggagggattactttcttatcacagggaaattaaatgcctgagacagcaacatagtgatttttttaaaacaaatttttaggaaaattgaactcaccctgtttactttcatagaaggcttttgggctgtgggaaggaacctatttttgtacttaatgaaatggatcttggcagtaaagggtttaaaactaactttggatttatttaaaaagtaatatccttgccactaacttgtcttctgtctttaaaggaaagagaatttttacagtgcctatagagcatgccattcctcaccagtcatttggcagtcctattagcaaactcatttgtcaaagcctcattaggtgattgcaaaagtactctcccaggacccactttggacttcttaccaagtcgtgtgtgtgtgtgtgtgtgtgtgtgtgtgtgtccgtctgtgtgtgcatgtatttgaaatggaagtgtgggaacatgacagtgtagacaagcttacagcccccatttttctttgagtggccccctctgataaaaggttatatactggaagaggacttaaaacctttgaaaaatcaaattctcttggaatataataccaaagtgttgttgttgtttttcttgcatctacatgttccatgaatattttccaaacaattcaatacattactcttcagcccacgcccatgctgacatcaaaaacttttgggaagaaaaattgttatcgaatagcagtgtcgcaccaagcagatggggtcactgtcccccaggataaggcatttctcatgtgcttgagaagaagactgtggatctgaaaatatgataggggctgcggcttattgaggcctcactattgagagggggcttggagttatggggaacagtgggctctagtgcaggactgctggggtcttaagcccactggaccacttcctagcttgccagccttgggccagtttatagccttttgggcctcagtcttcttatctgtgagaaagtgtaatgtcacctcccatgtcactgtgagcagtacataagtggatctgtgtaaatagcttggagcatcatgtagcatgtggaaatgctcagtaaatgaaccaggtctctcaaactctagggcccatgtttttccccttcaccactaaaacctcatgagaagcatgggctcaggagtagcaggaggcttctggcacagaatgagaagatgggaaagcgtgctgcttggccacaatggaaggaggagaaaggtcaaggagctcggtcagtaatccccactctgaggccaaggaaagaggatggaggaaagggcaaccagaacatcaaataccacataagcaagaagccataagtttctttccaaactaacagttaagaaaacagacctaaccacttctactcagggactacatcttatttgtttttgtatccatagtgcctggcctctagttgaacttgacaaatattggagtgtgttggcctgtttcttgttcactcatttgttcagtcattcaacaaatatttaagtgcctatcatggaacagccactgctttgagagcttacaatcaatgctgaagaaaacaacacggaaggattccccctgccttggcttcacctgggaggggagatgggcagtgagcccatgctagcttctaatgcactcaccacttcttttaataaatacaatactctccccgcttcccctaatgattctgtgaagcaaactagtctatagttcctggtatcttcttttcttgaaaagttgacatagatgacagttgtgtcctgaagtctgatagcttctatgaatttctcaaacattggttaccaactggtttggggatcaccttgacaaactgtgtaatttagaggtgagggcctcctttattggagtcaggagacctcttggatttgtgtcttcactctgttatgagttgagtggcctcaggcatcttctgagtttctcattcctttactgaaaataataatgcttatcttaaagtagcttgttcagaacttgccttgtctcaagaatcagccagacatttataaacaaatctgaatcctgaacgtcaacccaggcttgtctaagaattctcctctttataatttttagctgctcagagtagagagcctgtcaccaaccctcacactgttattacagtttcctgtttctccttaacatttattccaccacattttgcacatatgactttagaccttgaactttcaagtctttctagaccaaaggacaacaatgctttccagagagtccagcaggaatcacactgggaaagctaaaaaagcaactcagtccttttcacccagtctatttcatccaaccccgctgcccctccttgaatcctggaaggatcatctattgcctttcaactcaaagtgtgggacgtgtactagcagcatgggcatcaccagggagcttgttggacacgtggagtctcagactccaccttagacccactgactcaatctgaatcttgacaaggttcctgtatatcatgcatgttactctttgagaagcaccagcctgttgaatacctctgggccaaaatactattcagatgtgttgttctttttcaattacggaaataattagtgacttaaaactcacttctgattcaggactgcatggctgtttaagtcgatatgtctgcgttaatgctgttgtaatgacatcacagaattgaggcatttatgaactggagagtaaattctatatgtgtttaaaaattagataaataagaatttacatgacagtttaataggggctttaaaaatttaacacggataagtcatctgctttttcaatggattttcctgaatagtgggatcacaaaagaaatttatgtgtttttctaagtttctttttcttttaatgtggatttacaagtgattaatttaaaaatttgctctctgattagcaggtaacatttataatctggacctgtacctaagatagcttagcaaatgaacacaaatggcttactaggtctttgcttttgaaaacgtatggccatctaaaagtagtaaaggcaatttaataaatacagacaatctgctaagcagccaaggaaaaaaggtgcctgaattatatatgtctgcatgagtggacaagacgtgcttttcaagattaatgatttaagctgttctttacgttcccagactgattaaacaaggcttaattctaaacaacactttctccttttcttgcttcttcaaaattcactgtccttctctatcccttcaggattgattgcaggggtgatccaggatggtgtctgtctaaagccttaacttctctcccttcataaaaggaagattatcccttttttaattccttgttttcattgatgtcagatgagaggcattcagaaggagtgttagcattcactgcactttccctgaaagtggctcaacttttgattgagatgttcttgaagattctgttagtggcatcttggcatgctcctgtcctctctgactttgacggctcctcccctcctccttcttttctccctcacactcctgtccacacttccagtcaagtgctttccagagcctgtcattcagtttcttttctctctcccaaatccatcgtcttttcccaatttgtaggattttttctttttccctcttgttcagcatttcataaagttagtcctgccaggttttaataggggttccacccccctcaccgctaaaaaaaattgatcaggacaaagtataaaatattaatttagacagttaaatatcattttgtttgttggtttagcctcaggacaaattagaacttttaatatgctgccaggaggggttgggtggttttctcatttctgaatttatttccctgtagaaccttctttgaaagtatctaggaagaccagtgtttgatgaaatgtactttccgacctcctccttgacatctctcctacatgcttctctccatctcatgctatgtctaatgactccgtgtactgctccacgtgtcacatcctcaaatacatcctaaattaaacactaccaacattagctaacttctactgatcactccccccacttctttttttttttttttttgagactagtctcactctgtctcccaggctggagtacaatggtgccatcttggcccactacgacctctgcctcctgggttcaagtgattctcctgcctcagcctcccaagtagctgagattacaggcacctgccaccatgcccagctaatttttgtatttttagtagagacagggtttccccatgttggccaggctggtctcgaactcctgacctcaggtgatccaactgcctcagcctcccaaagtgctgggattacaggcgtgagctgctgttcctggcctgatcactcacttttactgctaaggcttttaaaagtattttgcctctttgattgtctatgaaatcaagcacagatatcttaacctgagatgcaagaccatgtgtgttcttggaccaaccaacttgcaatcaatcttcccccttccccagcatttaacattcttctccatgcttgatttttctttatgacagagaactttacccctcccaatattctataccgtttacttacatattttgtttgtcgtctattttacctcaactagaacgtaagctccatgagactgggatatttgtttgttcatgctgtgtcccaagcacctacaacagtgtccagcaaatggcaggtgctcaacacgtgtttccaatacaggcggaatgaatgagggagccttctcagtttcatctctggcctgtgcttggtctttattccctactcttctcttgcctttttttcactctcttttagccctcaatcttcatctgtcatcatctctcttcacccctcagagcctaactctctaagtagcatttcttccaaggagccttctgtattcgtgacccttctctctttgtatgggtccctgtctttggaatgttgttgtttatacctgttttaccagtcagttacattctgccttgtagtagagttccttttaagctgaaaaaggataatggggtattcatgtttgcctcttacatcactgtggaatatgctcagtaaatttataattaatagaacaaacccaacattgtgcttccaggaaagtaacccccacgtgtgcctcagtctgtaccatggggactgcttgacgcatctgtttcctcagttgagcccttaagatgaatgcttgatatcctcaagaggctattaacgagaatttttatttccccaaagtttctttttccctaaaaggcatttctttgatatataacaaagctctgttataaaaatttcaactgctcatcccagtaggagagaatgttctacgaattcagatataggaaggtttccggggctatattttcttttctttttgggttttcatgttcacatttcatctacatttcccctcttgggcaaataggttgcccaatttagggcaaatttgtttggttttccttccgatatctttatttatttttctttattatttgcttcctctcccttccctccaagagagttcagatacttaccacaatggataaacttatgctgggaaattgcaatgcttttctttttttgcaaagtacagacctcatgtacatatgaaggctgctgacactagctttccatctggccacaggaaagtgtgtcatctctttcttccattgcctgtctcctgtccccaggggcctcagtggaggccagacagtaacttttctctctttcaaaaacccacccaaatccccagaccctttctaatacagcttttccacgtattcatgtatcaccacctgaaacttgttccattctaagttaaggattaactaaatgaatgaaaattgtatttatttgggagacagaagtagcaaaggcttagaatcaggcagacttgtgtttcatcctcagattctcctatttactcattgtataaccatagttcagtcaattcccgttgccgagccttagtttctttgtctgtcaaatgggtataacaatgcttgcctcatcatattcttgcaaataaggtcagataattcatgtaaagcttggagcacagtgtatggcacctggtaatcggtctctctatgatgaagatttgctgatgctgctgcttacttttctggcttatggggcttaggttctgaatctttataatctttttgtgcctgctgcatatggtcaaatcatgtttgtttgatagacagacatgtggggtttttccttaacaagccattcaaccatgtatagtgaagaattgctcatggttggtctgttttccatgtctagatattagaagagaaggctcaaacatgaggttactctctgtagtgcagtgggaaagagtatattcccagggagcctggcatcccccattaatctgtaagcagacctataagcaaaggaagggctttaggataatccccacttccccgccccaccagctttattgaggtataactgatgaataaaaattagatgtatttctggtgtacaacatgatatatatatatgcattatgaaatgattaccacaatcaaagctattaatgtatctatcagctcacatagctgtccctccaggttcatccatgttggtgcaaatgacaggatttccttcttctttaaggttaagtaatattccattgttccattgtgtatttttatcacattgtgtattcatatttctgtattcattcattgttccatggatatctaggttgtttccatatctttgcttttgtgaagaatgatgtgatgaccacagggctgcagatacctctttgagatactgatttcattcctttggatatgtacccagaggtgggattgctgggtcataatgccattctaggagttgttttgcacgttgctagatgtttcctgaatgatatgagaagattcttaaatagagggaacctccctagagccagagctcacctggttgattcctcctaggagggacatggtggtggaaagagctctgctgggaagaatggggactcagctcttctgcatactgcagtgtgactcaggcagacactgcacatttctgggctgcgtttccttctcctcaggatgagaaagcaaacctagactgtctctaatatcttacagcactgcagatcctacccctgcctttttttttccagcctccatctgagagcctctttctgtttctggtaagggtatcttcacccgtcaccaccctggtgggctggcttttacgttgagtgctttggtgtgaaaagcaggcttcgttcaagttgacttcaactttcctctttaaccttttatcatgtgttcttgttcactctcttccttcatggtgtcaagtaaagccagtagggatgaatcaggttcactgttcttttggagatgtgaaatccatgaatggggctaggtttcattatgtctccctctgggtagacccaattccctcctaattgcctttttcctgttgatcattcacatcttctgccttggaatttctttgaagttttatcatgttctcccttcatcatgtccttccctttgtgacttcagattttctgtgggtagctgtaatttcctgcagaacagtgtctactagattccctctgagcatggctggtgcagtggtaggattctgtgaaacgttgtcagatgtgtgagtgtgcagattgataaaacagcgtacactccctgcttcgttcccacctctgttttatgtggatgatgacaattacagcacagcacctcatatcggtgcagagatttctcctgctgtgatctaatggtggtctgtgtgcatgtggactgggaaccagaaggtggctttttctaggagatcttggctgcaggcaagcctatttctgccaagctagggattgtccgggtcttgatagagctagctgttttgtaccattgttagtagccaggctgtaattctgacatttcaactacttggactctgaaaaggtgtggttgggccccagatcatcagccaagtcttccactcagcctgcttcatgacctgacatgcttagcatttgggcccctttccaagagtgaagtaacacactgatggggagacaagaaagtgaaatagtggccccttggttctcacggggaagaggggagatgtgttcaggcctccccttcctccgccttcattggtggttcctaggtgagaatcactgggaatcaggaggatctatcagaactgggaatcaggaggaaccttcagatgttgtgggcaaacaggggggcaaggggtgacgttaaaactaggctttgtcactttcaaaagtctgcattacagtcagccatggagaaaacggcctactttctacatcacaggcgtggcttaaagatataaggccaggccatttgaaaaggtttagtccctcgtagaaaggcatacaaatcacccctcctagtttgggttcccacagaggcaggattccagtgtacatagtttatgtgggagatgatcccaggaaacttgggaaggggagtggggaatgagaaggggaggaaggaagccaataaaggatgtgctatcaagctcgccatcactgtggacagctgcagctcagttccactgggaacgtctgggaaagagtgtagcacaggtgcctctgagtgatcacacctgagaggggaggttctgctggccagagaacctctggtaaggaggtgcaggggctggcagttggtcaggcccatgggcactgttacaatgaaggctgagggaaaacgggtggggcatcgattgctttgctgcaggtcccatcccggattcaccttcccagggatgctagatgggagtctagacattgtctctacagaggatgaatctggaattcagaaagatgatggaggcccactgtggagaagccggttcttgagagttgggtgagaatccaggcttcctgactcttgctgcagtgccctttccacttggctacttaaggcagaaatttaaatttgtgatgacttttgaggcatactgtacctgattcatggaacaatattgtccttcccaccatgggctctttagtctttcttggagtgaaaaattgtcaaaagattaaatcctatttgggagccagagaaaaagcaaaagaatggctgagcgtgtaaataaagtctcctaggaagatcatatttttgaaggtatttattattcatatctttttgtcattgtcgtgttgtaagtgtttacctgggcttctagctttttgcttttccaaggacactgctgatccatcctagaagaagctgacagccaccaccttgacactggcttattgctgtccaggttatttaagatgcggaggaaatcttatcacagagaagcagcttctaaacatgtcctgccaggtgggtgatgaggtaaagactgcccaggcggccttgtgcacaccacatacttgtggagccactttgatgaaagggtctggattatttgcaaagtcttgtgctaggtgaaggtgggctctttcttaaattctgaaatgcccacgagtctttggtaatgttcatagtgaagcatctgagctgagcctgaggcttcccaggaggctgtgccaaggacaaaacacactgaggatgttgaccatggcctcctgacagaatgaaaggcccccacagtttcaatttaaaccgtaaacatttaaatagaaaatgaagtgctggtgtatgactctgaacttgtgagactagctgaaaacaccattttgaccgttgggcagagatttcccatcatgggatcagccatagaccatatccactgggaacatggagaaaaggtttagaggttccaccaacattttccttaattcttagatgccttttggtggttgaattctgtccttattttcttatttcctgaagcccaaaatataagctctataatgtggtcattcataaacctttagggatattcctattggaaaatgttgtgcaagtcttattttagagttcccagaagggaattaccggaccttaagatatgcacgttttgaagatattggatacaactggtctccagaagtgggaagaccatttttgctccttttaatagtggtgtctggtgtctctttcctcagatattcagtaatggatatgtcatgctttttcattttgcccttctgataggtggaaaatgacgtaacatccttaatttaagttacattttttggatgccattgtgaattttttttcccctatagctattgcctatttgcataccctctgaagttgcccgttcttgaaggacactgataatgttctcctcccctgccctttcctttttgttgccagaataacctaatctaaaccagaaactccatcttttcttccccagggctcctatagacccataggcggctagagtgtacctgtgagcctctggggagatgtctcaccgccagagagctgtccccaactcaggacctcacctgcctgtgcgtgcgaaattacacctgagatggagtggctgtgtccagctaacaaagccgtttggggaggggatttcaagcatggctattccttgttcactttaataaaacatggcatgaattcaggcaaagggacttactccttactccctcacctcagatttttctgtgttttgctgttggtataacttgtcctgtgttgctaagttttaaacatatctatattttgtttaaaacactaaccatggctttgtttgagtggcttatttttatgtcctaaggagttgacctagacagggaacagttagtcatattctgtttcaggccaatgcctctgagccccttcccttctcgtttttctctgtctgaaatgatgctcttggctggccccattttgctgtttgtccaaacgggcgcccctcagcaatgggcaactttctccattttggtgtcttatctaagaccttgcccactggcttaaagagttggcttgggttccgtcacagtgatgagttgcctgtcccgccgtctgtagtcgggagggctttttccgtgatgagaatgagctgcaaactcaggcaaacactgatcaggagagacatgaaacccaacctggcccagtcggcttaaaaatagtccagtcatttcacccctggaattttctcttgcttatgtgggtggacaattctcttggaacaccaccaagatcatgaggaggagaaaacagagcaggcaccaaccacatgaatccaacccaggctgaccccgtagccggtggtgcattggccctcacaggtttgcaccctgcatgcagggccctttctcccccacgagagggcgctctcgtcactcttaaagcaatcgtactggggaacactcaggttgtttcttagtgaagtccccgaagagcactgcatttaagctgctactttgtgtctcagcttctactttcaaggtttgttatgaatgtaaagacattctccaactcaagcaagtgtgggcaatattagtgtctggaaacgcctgttgcaaatgaagcacagccactgcttgtttgtgtttcgttagtgaaacgtgattgtaacccagggtttttgacgctcacagaagcatccgccttggtaatgctgtacatccaggctgctcttctttgtccctaacctggttgcaatgtggccgtagcatgcttgtgttgacatctgacaggagatgaggacttgacttcctgggctgatcttgcttattttggggagagcaggagtgcccgtggttagtgtggatcagcctgacaggagattttctattgagggaggatttaagactgcatgcaggcaagggaaatacaagccatatttcaccagctcaatacaccagggagcgctaccatttaacgaaaaccaccattctgacttccgggtttttaggtcatctggcagccactgggtggggtcagtttcttggcccttgattagaagttccttctgattacaaaacacctcttgattgaaatctttgcattttctttgcatttgcatttccaccaatctttttattttttattttttttgccttggaggatgtgtgtatgtgagggtgaccttctctttatttgtgggaatcggggagtgccctcctccctacaaagtcactataaagctacgggctttgctgcccttggtacagggtctagaagtggttgttgggtggtgaccagcacagtgacagtttatttcctggacctttgaacctaaattcccacaggaagaacataaaggactcagcaaatcttgccccccgacccccgtctcctccatgcgcctacactggagccatgagtactactgctaccgtcactacagccaaattattatagagaattactatgtgccaggcatgggtaatttttggttgttttaatcaactttgtttcaaacagctttagatttgcagaaaaactatgaatatagcaagagttcccccactttctcctttttttatttattttattttatttttttgagacggagtctctgtcgtccaggctggagtgcggtggcgcaatctcggctcactgcaagctccgcctcccgggttcatgccattctcctgcctcagcctcccgaatagctgggacgacaggcgcccgccactacgcctggctaatttttttttttttttaatatttttagtagagacagggtttcaccgtgttagctaggatggtctcgatctcctgacctcgtgatccacctgccttggcctcccaaagtgctgggattacaggtgtgagccaccgcgcccggcctcctatttttaacatatagtttctcctgttgttgttgttttaatcatattagcataacacatttgttacaattagtgaaggaatattgatacattattattaactgaagccaatactttattcggatttcctttattttgacctagtgtcctttttctgctccgggagcctacccaggataccgccttaccttagttgtcatgtcttcttaagatcctgctggcggtagtggtttctcagactttaaacttgtttttaatgaccttgacagttttgaggagtactgctcaggagtttagtagaaggttcctcttttggaatttgtctaaggttttctaataattagactggggttatgggtttttgagaggaagaaggcagagagaaaatgccattcttatcacatcatattcagggtacatattattaacatgatttaacgttgtagatgttgaacgtcatcacctcgctgagacggtgtttgtcaggtttcttctcgtaaagttactgtcccctctcctttttttatactgtactatcacaagaaagtgaccacgtgtagtccacacttaaggagggggagttatattccaccctcagagagcacagtacctataaacatttttgaaatttctctgcacagaaaatttctctcttcttccccatttatttacgtattcaattgtttatttctatcaatatggactcatagagatttattccatactttgagttataatcaaatagtatactactagattttgtttggttttttttttgcctctgggagctgtttcacgtgactcctgtgtccctttgacacacccccatcattgcgggtttttgtttttgaggtgtttctttcttgctttctttgtggcactcactacaagatactccaggattatcttgtacatcttctgccctagtccttgaatcagtcatttctccaaaaagccctggccttttttttgagacggagtctcgctctctcgcccaggctggagtacagtggcgcgatcttggctcactgcaagctccgcctcccgggttcacgccattctcctgcctcagcctcccaagtagctgggactacaggcgcccgccaccacgcccggctaattttttgtctttttagtacagacggggtttcaccgtgttagccaggatggtctcaatcttctgacctcgtgatctgcccgccttggcctcccaaagtgctgggattacaggtgtaagccacggcgcccagccagccctggctccttttattggagggtggtattagaatagggtctgggctccaggtgtgctggtgcttctggttgctgctgctttataagctctcagctgacagcaagaaaacatgtgcatgtgaaccaatctatagatgcctatctactgatctacaaatatatctgtatgtaaccattggtatctgtattatgctaaacatgtgttcacactgacgtttccagctcttaagctgttacatgtctccagctctaagccattatcacgtggatcattctagccttcccccttgcctatctgtagcctcctactccaaaaatgataaacttggctctcagcatctgtcatgcatttatttagttgttcaattccagtatacatatgtagcagtatcaaaattgttaacttatacccccatggaaaatagcctcgtcaactagagtacagtgcttgtgtacggtttattttgccttagttttacagactgcatacatttccaaagccacttaaatagcacctttttcttccatccactttagtgagggttgttcacatatgtaccacagattgctttgtcacatgctgtatttcattccgggattaccctgactgcctaaatgatttttttaaagtttatatatgttaagatttgccctttgtgctgtaaatttcaatgggttttcacaaatgcataatattatgtacccaccattacagtaatgtacagaataactataccaccctaaaaattcatctattcacccatttaactatcctccatacctggaaaccatggattttaaaaaactatctacagttttgccttttccagaatgccatataattgtaataatataggatatgctattatgtctccactttccacttgaggactctgaccttagaactcatgattgcccacggtttcttggcttgtaattggtgatgctagcgtcaacccaagtctctgatgttaaaacaggaactctgaaactccccactatgctgcctattttccaatgaaatgggtccaggaagccatctgataaatattttcactaggttgtcaaaaattaataaacatgcctctttcattaccttcggaggccatctgtggggtggttgtgagtcagcctctgcagccatgctgccagaatttgaatcctacctccttcacttcttacccatgtgatttgaacaggtggttttactttttttttctgtctttcctggcttactaaacaattcttcctttttaggaatatatgggaggagggatctgtgcaatgcagttctacaccctggacatagcaaccgactgagtcaggccaattaacttctctagcctagcgatttgaaacccagagccggggccctctgacatgaaggcacctttatatcttcagtctgtagggcaggtcataacacctgcagccacagttcctggggtggccccaagtctggatgcttagggatttattaattttttgagcaactccagtatcttaaaaagaattcatccttctcttccttttgttgttgttcttcttttattcttatttttaaaatttaagcgaggtaaaatcagcccctcttggctacaggtactttaattactacaggagatcatagtagctacctcactggtcataagggttaaataagataatgtataagacagttagcacagggaatgagggaattgtcagggaataagtacctggtaattagtagcttttactattatctaataatagttcttgatatttacttagtgctttgtaatgtgaaccatacactcctgtgtgcttatctccttgacaattgggtggaaatggcatccacattttatggatgagcaaatggccatgctttggggtttgcccagggtcacaaagctggcaagggactgagccaggatccccactcaggcccttcgtcatgtcatgtatccagggttctctccaatgtgccagggtcgtgtggtttcctgggggtgtgatggagagggaggcagtttccctttcccattttagggacaagagtggagatgggaaagtactttcctggggacagaggatggaggtgaaggtggtggatttctttagttatggggagttaagttgggaatgttaggcctctagtcctttccttttctcttttcttttctttttttgagacagagtcttgctctgtcagccaggctggagtgcagtggcacgatcttggctcaccacaatctctgcctcccaggttcaagagattctcatgcctcagcctcccaagtggctggaattacaggcatatgtcactggctaattttttgtatttttagtagagacagagtttcaccatgttgaccaggctggtctcgaactcctagcctcaagtgatctgcctgcctcggctttccaaagtgctgttgttacaggcatgagccaccgcacccggtctgggccctgagtcagtttctgacctgccttctgagctctgcatggtgcctggggtcagcctgcttctggcttcaccactctctgttctactgcatttattgtgcaaacagttgattgaatgcctgtttatgtgccaaacactgtgttagggaagatgaaaggatagatgagacccattaaggtctgccctttaaaagcttgtaatatgttggagaaaccagacatgaaaacaactaagtataacacaacataatgtctgaaagataaaaacaagtgttttcagaacacaataattcacagaatacctacacatgccataaactgtgctaagggttttccatggattagctaatttaatttccccatcaaccctacaaaggaattactgtggttgttctcatttcacagatggggaaactaagcacagagatgttaaatcacttgctcaatctttataaagataggaattgtagagttaagttccagagcctgccctgttaatgatggcactaaactgccttccagagaaggtcagaatgcatagctctttgtaggattgttggtgaaacttgcagagaaggtattttctgaactgatattcaaggatgagtaggaatttataggtggatagaaaaggaattgtattccaagtagaggaaggaatgtgagtggacacacagatggatgaaaatatataatgtgttcagggaatggctagtaatcccagaggtcaagagtggcaggcagtggttggctattacacttaaaaggttaaagctaatgccgtaagcattggggagctctcagaggattttaagaaggggagtctgtgtctagatacacttcaaaagggttcctgtagtagcagtgtgaaggctggtttgggcatgtgtcagaatcatttgaaagccaggagggcctgctggaaggcctcgcaatagtctaggtgagatcatgcatcggctttgggatgtggcagtagaagtgctggcttcttgtggttttgggggttggtgcttcacagagtgaagaaagaggtgtcacaagggtcattaaaatcccactggtgtgcctgttgatataggaggcacccatcttactctctaacggtgttctacaaactagccaggctgtgaactgttcattactgtttgggccaaaataaggggcttgcaccagaatataaatcaatgcattgcttccatcacggagaaaatcttggtgcacacacacacacagtctactgaagcaaaaagtgtgcttagtgacaaagttgatttggattctagtgcaagctcttatttccttgcagcccacaaacaacatgtggactttcaccagtccacaaccataaatagagtaatgctgctgtataatcaacatatcttacttgctctatacttcaaatatcttcttctctacagctgaattttgtagatgaaaaatttattttaaagtttcaacattttaagaggtttctttttactctacaggcaagccacttatgtaaaggacccatcttttaatttttgagttttggaaacttacatgagtacttaaccttgattaataattgataactctttctgtagagatgggccggtgacctcttgctactctccagcattgttaagtgctattgcctttcagacttcagattctttccaacctctaacacttgggccattattccttctccaaggttctcagaagtgatagagcactggagaggcaatgaaatcaatgatttctctatcacttgagtgtaaagtgtaaactaaattatcacttagcagccatgttattaaagggattcaaacattggtaaagtgtctggactaacagactttcaagattctttgcaaccccgaggttttcgatttgtcggaggtacagaactggtaagcggcagagagcggcagcacctaggtttcctgacccttgctgcttgcttccctgccgctcccctcagtccttcatcaagagctgcagaacaagttccactctccctggaggataggtgctgtgggtcttcatttaatggtgggacctctggagatttttctctctgctaatcacccaaggatgctttacatactctactgagatctaaatttatattgcagatgggccgatgctgatgtcttaaagtacttgctgggaagataatacccaatctctggagaaaagagctttacatttctttttactgagggctgttctgtaatttggctctcctaactctggcttgccccaacaatgagctacgtaattggccttaaagggacacccattgatttggacagggtctgtacatacaccagttaaacacagtgcctcatgctgggtctgtgtatttctactgggctttcttttctaaatgttatttaattccagagtttgcattagtgcttcagtcaaatattgtcaggctttggtcaaaaacccttaactgaagatcagggttggtcataaaaagttggaaatcgacatttgccaatgccaattggcagacagttggcactcaaattggggacagggccaggcaaaaaaaggtcttcaaaaactgtgctccaaaatcctctaaaatccactgtggttgcatcattgcccaaacttacagcttaatatgttggctttgctgcttaacagctgtgtgaatgggcatgttacttaacctctgtatttctccatcataagatagacataataaatttaaacccatgggttattgtgagaataaataagataatccatgtaaaagatgctcagcctagtccctggcatatggcaggtactcaagaaatgtttaatttgaatctgttgcatgcgcattctccgttgtagccagataagtctctctgcaccatgaaatgccattctatccctgcctttatgcttttgtttatgagcagaaggaaagtatgacctaatgattaataacatggcctttgctgtcaggcacacctggctgaagttttgttttctctgttgcaggacgcgggtgagttaattagctattttaagccccagtttcttcaccgtataatgggggaataatggtactgaccttacagtgttgtagtgagggtttaaatgagataaaatttgtggatgcctggttaagacaatcatgagccagcttattgagctcctattatgagttggtcctggaggtagagtggtgagcacacccagctgggtctaatggatgtataaccataaacagttacaagccttaaagtaaatatttacaaataattacaaaggggcaatgtatgtaagtgccaggtgagcagttagcaagggggcccagctaggtctaggggtcacataaaacttctcagttaccttgaataccatacaggatgtagtattaaaggttgacgtgaaggacaaagaggaggtgaccaggcccagagctggggaaagactgtccaaggcaggggaatagcatgtgtgtggactcagagaccggagagcatgcgctctgttttgaagagctgagaaaagtcctgcgtgggtcttgtaggtgttcaatcaatggcaactgtcattattctagattccctctcagggtgctgaatcctaaagcagcttgagtgcctaccttaagtctttttctctttttaatgaagcttcctttgactaactcagaactgattccaatctactctaaaaccttatagtattttagtcagtgctatatagatcaacacttagttatatgattttaaaagttgttcttgaagttttatgtatctttcctgagtcatcaaattgattgaaaattcactgaagagccctgattttgtattatgagtctccagagggcttagcacaatgctgagtccacagtgattaacaaatatgtaatgcttgttgcagaaatatatcttccacctaaaattctgtagtgtaccctgggcagtgttgggagggtgtacacttgggacccagattcgacaacttaaccattttctatgtgtataatcttgggcaagtcattctttttaagcctcagttaccttgaataaaaaatgaggatagtaccatagttcatttactgtaagactcattttcttttcttcacattttaacatctctaaaacttgaatgtgtcttacaataaatggcatgttatagtttaattggcagtattttttttctgtgttggtgattataaaataatggtgtgtcttaaattcagtgacattttaggtttgatgaaataaatacaacttttacattttaggatggttatgaaaattcaagctaatttacacaattcatttgtccacaattcatttacctgatgttggcatgacagtgaagaggtagctgcagacaatcaaaatcattcctgtgatccagtacaagctttgctaactgccaaagttaaaaactgttacggccgacatgcatgccagaactcaaaagccacctacctttagcctcaattcctccagatgtattttgctacttttacacattgttaagttttgtggcataatgcttaagatgttggatttgttgaggagttcccaccctcctaccctagttctaagccaattgagaaataaggtgaaaaaccaacagatgaagaatcaaaatgtcactaaattctagattgtagtgtgtagcttatatctatggttaagtgggctctgtgatactgagccccagaattacctgtgcatttagggatatgctgataggctgctgctgtgagggtgcaaaggagaatgaggatttctgtgggcagcccattccaaggagagagggaaagagctgggagctagactatacatgtcactcacagatcatgtaagtcagtcttcaggccagtaaagaaactccaatagggccctgcccaactaaagggaacttctggggtggggcagcacctggcatagagtaggcttttagtagatggtagctattagggaaaatcatggcagcttttgagaagaaaaagaagttatcccaaccttcaaaaatactctgttttttacattatgtaccccttaagcagacctttaagggcatgtatgtttgtctaggattcctaagcattattttcattaaatattgttagtccagtgattacttggttggttatgcagttctcaaatcaggtggattttaaaacattaatatctcagcaatctttaaatacactattcaaattatgtacttacagtaagtccataataatagggtgttgcaaacacaggaattgctatcataatcttaaagataaaaataatttgagtaaataaattaggaaggggaaaggctgatgttagtcaatgccaaagctgattttgtagagccagaatgaaaaaaaatatgtgattgaaaaatgtaggcatctatctgcaagactttctaaaaaaaatgcagatagtagtaataaactgcattgctggagagaggggactaaaatgtgtgtgtgtgtttttaagatttaacttttaagttcaggggtacatgtgcatatttgctatataggtaaacttgtctcaagggggtttgttgtacagattatttcatcacccaggtattaagcctagtattatataggtaaacttgtgtcatggggtttgttgtacagattgttttgttgaccaggtattaagcctagtacctgttagttattgttcctgatcctctccctcctctcaccttccttcctctgataggccccagtgtatgttgttcccttctgtgtgtctgtgtgttctcatcatttagctcctatttgtaagtgagagcttgcagtatttggttttctattactgccttagtttgctaaggataatggccttcagcttcattcatgtccctgtaaaagatatgatcttgttccttttaatggttgcatagtattccgtggtatatatgtaccatgttttctttatccagtctatcattgatgagcatttaggttgattcaatgtctttacaagtgtgaacagtgctgtaattaacatacatgtgcatgtgtcttttataatagaatgatttgtatttatttggatatatacccagtaatgagattactaggtcaaatggtatttctgtttttaggtctttgaggagtcaccagtgtcttccacagtggttgaactaatttacactcccaccaacagtgtataaccattcctttttctccacaacttcaccagcatctgttatttttgactttttaataatagacattctgactggcgtgagatggcatctcattgtggttttgatttgcatttctcaaataatcagtgatgctgagttttttttcatatgattattggctgcatgtacatcttcttttgaaaagtgtctgttcatgtcctttgtccactttctaatgggttttttttcttgtacatttgtttgtatttcttataaatgctagatattagacctttgtcagatgcatagtttgcacaaatttcctcccattctgtaggttgtctgttcactttgttgagagtttcttttgctgtgcagaagatctttagtttaattagatcctgtttgtaaacttttgcttttcttgtaattgcttttggtgtcttcgtcatgaaatctttccctgtttctatggccagaatggtgttgcctaagttggagtttttctagttttgggttttacatttaagtccttaattcatcttgagttaatttttgtatatggcggaaggaaggggtccagtttaagtattctgcttgtggctagccaattatcccagaacaacttactgaatagggaatcctttccccattgcttgtttttgtcatgttgaatatcagatagttgtaggtgtatggccttatttctgggttctccagtctttttgattggtctgttttctctttttgtaccagtactatgctgtttggttactgtagctgtgtagtacagtttgaagtccagtagcatgatgtgtccagctttgttcattttgcttaagattgccttgactatttgggctcattttttgcttccatatgaattttaaaattgttttctctagttctgtgaagaatgtcaatgctagtttaacaggaatagcattgaatctataaaatactttgggcagcatggccattttaacaatatcgattcttcctatccatgagcatggaatgtttttccatttatttgtgttatctctggtttctttgagcagtgttttgtagttctccttgtagagatctttcacctccctggttggctgagtattcttaagtattttattatttttatggcaattgtgagtaggattgcgttgcctattcggctcttggcttcactgttgttgatgtacaggaatgttagtgatttttgtgcatttattttgtaacctgagactttgctgaagttgtttatcagcttaaggagcttttgggctgagactattgggttttatagatataggatcatcttgtctacaaacagggatagtttgacttcctctcttccgattttgatgcccttttcttctttctcttgcctgattgatctggccaggacccaatactgttgaataagagtggtgagagagggcatccttgtcttgtgctggttttcaagggaaatgcttccagcttttacccattcattatggtgttggctgtgggtttgtcatagatggttcttattattttgaggtatattcatttaatacctagtttatcgagagtttttaacatgaagggatgttgaattttatggagagccttttctgcatctattgaaataatcatgttttttgtctttagttctgtttatatgatggctcacattaattgatttgcatgtgttgaaccaaccttgcatcccagggataacaagcctatttgattgtggtagataaattttttgatgtgctgctggatttggtttgtcagtattttgtagttgatattcatccaggctattggcctgaagattccttttgttgttgttgtgtgtctgccaggttttggtatcagcatgatgctggcctcatagaatgagtaagggaggagtcactctacctcaacttttgggaattggttcagaaggaatggtaccagctcatctatgtacatctggtggaattcagctgtgaatccatctggccctgggcttttattggttggtaggctatttgttgattcaatttcggagctcattattgtctgttcagggattcagtttcttcctggttcagtcttgggagggtgtatatgtccagaaatgtatcaatttcttctagattttctagtttatgtgcatagaggtgatcataatattctctgatggttggttgtatttctgtggggtcagtggtaatattccccttgccatttctgattgtgtttattggaatcttctctcttttcttctttattagtttagctagtggtatgtctgttttattaatttttatcaaaaaacagctcctggattcattggtcttttgaatgatttttcatgtctcaattttcttctgctcagctctgattttggttatttcttgtcttctgctagctttgggattgtttgctctagattctctagttctttagttgtgatgttaggttgttaacttgagatctttctaattttttgatgtagtcatttagtgctataaatttccttcttaatactgccttagttgtgtctcagggattatgctacattgtatctttgctctcattagtttcaaagaacttcttgatttctgccttaattaatttttttacctcaaagccatttaggaacaagttattcaattttcatgtaattgtatggttttgagtgaatttcttagtcttgatttctaatttgattgtgctgtggtctgagagattgttatgatttcagttcttttgcatttgctgaggagtgttttatttctgattatgtgatcaattttagagtaagtgccatatggcaatgaaaattgtttttgtgtggagagttctgtagatgtctatcagatccatttgatctaatgctgagttctggtcctgaatatctttgttaattttctctctcactggtctgtctaatattgtcattgggtgttaaagtctcccactattattgtgtgggagtctaagtctctttgaaagtctctaataacttgctttacgaatctgagtgttcctgtgttgggtgtatatctatttaggatagttagatcttcttgttgaattgaaccctttatcatatgtaatgcccttctttgtctttttatctttgttggtttaaagtctgttttgtctgaaactgagattgcaactcttgcttttttctgcttggtagatttttctccatccctttattttgagcctatgtgtgtcattgcataagagatggtctcttgaggacagcatatcaatgagtcttggttttctaatccagcttgccactcagtgtcttttacctggggcacttagcccatttacctttaaggttaatattgatatgtgaggatttgacactgtcaccataatgttaactggttattttgcagacttgtttatgtgattgttttatagtgtgactggtctatgtacctcagtgtgtttttgtagtgctggtaatgctttcctttccatatttagcgtttccttcatgagctgttgtaaggtaggtctggtggtaatgtattccctcagcatttgcttgtttgtaaaagattatttctcctttgcttatgaagcttagttaggctggatataaaattctgggttggaatttcttttctttaagaatgttgaatattgacccccaatctcttttggcttgtagagtttctgctgagaggtctgctgttagtctgatgggcttccctttgtaggtggcctgacctttctctctagctacctttaacatttttcctttcatttcaaccttggagaatctgatgattatgtgcttggggatgatctttagtattagtaaaaagaattttactggggttctctgcattttctgaatttgaatgttgccctctctagctaggttgaggaagttctcatgcatgatgtcctgaaatatgatttccagattggttgcattttccccatctctttcagggacatgaatatgtcatagatttggtctctttacataatcccatatttctcagacattttgttcattcattttcattatttttctctattcttgtctaactgtcttatttcggaaagccagtcgtcaagctctgagattattttcttcacttggtctattctgctattaatacttgtgtttgcattatgaaattcttgtagtgtgtttttcagctctgtcaggttggttactttttaaaatatatatatatactggctgttttgtctgtcagctcctgcattattttatcatgatttggagaggtgatgcagtcatttggaggaatgaaagcacactgactttttgaattttcagggttcttgcactgacttcttctcatctttgtgggtttatctaccttcaatctttgaggttgctgaccttcagattttttttttatcctatttgattatcttgagggcttgattttggtataaggtggattcaactgactagcttcatttctggaagattttagagggccaacattcagctcccaactcctgcactgtgtactctaactctgggggacttctattgggccccagctttgttctttggctccccaaggttaggaatccactgcggtgaaggggcctgaggtgtggcagctgtggcagagtgctagcaggtgtcggggtgcctgcctccatgtgggtgttcaccacagtggcagaaacaatgcagctgttgggggagctcctgctggcaactatatgtatggttgtgctggacatggtgttggcttgggggtggggtgctggcagatgcaggcctgggtgccttctctgtgccccataagcaggagtgattggtcagcatgggggaggactgttgttctctgcaaaaatgtttaaaaaagaaattgtttcaaaaatctatataaagctttggattctgtaaatccaaaattcattactggtttattactttactggccagggattatggcaccagaagagagatctgtggttctgacaataagccatgaatgtggtttgcccagtacatggtttagctttgtttctgtatcagacacgctagtttaatttacaaatggagttttgatatactcaggactgtgaataagtattggggggtggtgtctggtgaaaggcagacaaaccacagtagctcatttccttttattgatccgagcacaaagcattgttgttgcatcttagaaattaaaatcctcatttacagaatagtgtggtgcaatctggaaagatgttgttgtggtctctcaggagtgaataatatgagtttttaaacattttccaagaaaaatttacatgatttcaaacattctaaagcataaggatgtacagtatttcttacagtagaggaaactgccaaatattttggaaaaatataagaaaggaactgtacattggtaagaatgcattttcaaagactatttattttgtttgtttttaactgaacagttattcattgagaggggtgtgtgtgtgtgtgtgtgtgtgtgtgtgtgtgctgaagatagtattatcccaaataatcatattatatagaggctacaactcagtcttgcaaactgctcttacttgcaactgacagctacctcccacaccctcttggcatttctctagtgaagctattgatgtaattattgcttttagggttctgtattaaatttaaaaaacaacttcttttaattttgtgcttaatacagaaatcctaaaaaatcatagaaaaacacaaaggaaaaaaatccagcattaaccactaactaagtggataactaagatcagagaagaaactaaaacaagtaactaataactaagatcagggaagaattgatggtgatagagacgtgaaaaatcctccaaaaaaatcaatgaatccaggagctgttttttttttgaaaaaattaacgaatagatagaccattagctagactaataaggaagaagagggagaagaatcaaatagacacaataaaaaatgataaaggggatatcaccactgaccccacagaaatacaaactgccatcagagaatactataaacaactcgatgcaaataaactagaaaatttagaagaaatggataaattcctggacacatacaccctaccaagactaaaccaggaaaaagccgaatccctgaatagaccaataacaagctctgaaattgaggcagtaattaatagcctaccaaaacaacaacaaaaaaaaaaaaaacaagaaaaaaaacacagaaaaacaaaacaggaccagacagattcacagattcacagctgaattctaccagaaatacaaagaggaactagtcccattccttctgaaactattccaaacagttgaaaaggagggactcctccctaactcattttatgaagccagtgtcatcctgataccaaaactgggaagagacacaacaaaaaaagaaaactacaggccaataagccaaataaacattgatacaaaaaccctccataaaatactggcaaaccaaatccagcagcacataaaaaaaaaacttatccaccacgatcaagttggctttatcgctgggatgcaaggctggttgaacatacgtaaatcaataaacgtaatccatcacataaacagaaccaaagacaaaaaccacatgattatctcaacagatgcagaaaagacctttgataaaattcaacattcttcatgttaaaaactctcaataaactaggtgttgatggaatatatctcaaaataataagagctatttatgacaaacccacagacaatatcatattgaatgggcaaaagctggaagcattccctttgaaaaccagtacaagaccaggatgtcctctctcaccactcctgttcaccatagtattggaagttctggccagagcaatcaggcaagagaaagaaataaaggtattcaaataggaagaaaggaagtgaaattgtctctatttacagatgacaagattttatatttaaaaaccccatcacctcagcccaaaaacttcttgaactgaaaagcaacttcagcaaagtctcaggatacaaaattaatgtgcaaaaatcacaagtattcctttacaccaacaataggcaagcagagagccaaatcatgaatgaactcccatttgcaattgttacaaagagaataaaatacctaggaatacaactaacaagggatgtgaagacctcttcaaggagaactacaaaccactactcaacgaaataagagaggacacaaacgaatggaaaaacattccatcctcgtggataggaagaattaatatcatgaaaatggtcatactgcccaaagtaatttacagattcaatgctattcctatcaaactaccattgatattcttcacataattagaaaaatcgattttaaatttcatgtggaatcaaagaagaccccatatagccaagacaaccctaagcaaaaagaacaaagctggaggcatcatgccacctgacttcaaattatactacaaggctacagtaaccaaaacagcatggtactggtaccaaaacagacatactgactaatggagcagagtagagacctcagaaataacaccacacatctacaaccatctgatctttgacaaacctgataaaaataagcaatgggaaagaatctcctattcagtaaatggtgctgggaaaactggctagccatatgcagaaaactgaagctggaccccttccttacaccttatacaaaaattcactcaagatggattaaatacttaaatgtaaaactcaaaaccataaaaaccctagaagaaaacctaggcagtactattcaggacataggcatgggcaaagacttcatgactaaaatgccaaaagcaattgcaagaaaagccaaaattgacaaatggaatctaattaaactaaagagcttctgcacagcaaaagaaactattatcagagtgaacaggcaacctacagaatggtagaacatttttgcagtttacccatctgacaaaggtctaatatccagaatctacaaggaacttagacatatttacaagaaagaaacaaacaactccatcaaaaagtaggcaaaggatatgaacagacacttttcaaaagaagacatttatgtggccaacaaacatacgaagaaaagctcaacatcactgatcattagagaaatgcaaatcaaaaccacaatgagataccatctcatgccagtcagaatggctattattaaaaagccaggaaacaatagatgctggtgaggctgtggagaaataggaagacttttacactgttggtgggaatgtaaattagttcaaccattgtggaagacagtgtggtgattcctcaatgatctagaaccagaaataccatttgacccagcaatcccattactgggtatatacccagagaaatataaatcattctactacaaagatacatgcacatgtatgtttcctacagcactatttacgatagcaaagacatggaaccaacccaaatgcccgtcaatgatagaatggataaagaaaatgtggtacatatacaccatggaatactatgcagccataaaaagaaatgagattatgtcctttgcaggaacatcatcctcaacaaactaacacaggaacagaaaatcaaataccacatgttctcactcataagtgggagctgaacattgtgaatacgtggacacagagagtggaacaatgtgcactaaggcttgttgtgggatgggggtgagaggagggaacttacaggataggtcaatagttgcagcaaactactatggcacacgtatacctaggtaacaaacctgcacattctgcacatgtatctcattgttttttttttttagaagaaataaaaaaatttcagtgttaatgactgtttacattttcgtgaattctttccaatatttgatatttatacatatataataaaattatatctacctacctatctgtctacctatctatctgctttctagtctccctttttcttttacttagctcagatcatgaagatttttttccatgtcaataaatatatttcttctcttttctttttcttttcttttttttttttcttttttttgagatggagtctctctctgttgcccaggctggagtgcagtggtgcagtctcagctcactgcaacctccacctcctgggttcaagcgattctcctgcctcagcctcccaagtagctgggatcacaggtgcccgccaccatacctggctaattttttgtatttttagtagatacaaggtttctccatgttggccaggctagtcttgaacacctgacctcaagtgatccatctgcctcagccttccaaagtgctgggattacaggcatgaccaactgcactcagcccaataaatatgttctataatacgctacttaatgatacctattacattatattgtatggaagttccattacttacttaatctgttcttcctggacatctgatttttctttattgtaaaatgtgacatcttaaacatctttacatattcatcttcttccacgtctttgattacatcctttgtatagctcttagtagtgtttttgctgggtcaatgtttttgtaaataaaaaaaaaatgttaaagactttagacatgtataaccaaagtgccccagcaagagattgtaatccgcttacactgcctccaggagttttttgggagtacttgttttttcctaccctctcccaccagataatatgattctttttaccatttttaacccattggataggaatatattttcatgtttttatttgcatttctttggatttttgaggctacgtattacaaagctgttattttaaggcataccagagaacatgaaatcttattttatccatattttggttttatccatttgctttgaaccccctgaatcagctgccctgatggatagtttttttttttttggtgtgggcttggccatgatggggaacttggttgaaagatgagtgaagttaaggcagttcaaggatgtcatactttttagaagtaccagacaatcagaaaaaagtacagaataggagaaacaaagaaatcaaatacttaaaaaatatattcccccaggtcaatgctttgccatgaaaaggagaaaaaacagttctttctctctaagctgcagtaccccttggtcactgttccaaagcttggggcagaccatttgtcctatactatggctacatgtggatgaagtcatttttgtgtggtcttttaagactgaaggtactaatcacaattttaacattgcttctccagaaaaatactttctgagttacgaactttggggacacaaacctattggtcatttggagatctagtttcccttttatttttctaaattaaacattaaacaagacaatctgagctttgcctttttttcttttgggtaacttgatttcccaattataaataatgattatttaatgtctgttaattctttcacagtttagggtgaattctaattagccatctccctaagatatgtggtttgtggcttgaaaagttttctaatgccttccctccctagaactaatgactcagaactgagaaagactgacacagagcttcatcttctgctggggctgcaaatgctctggagattgcccacgccctcttgcagccactgctagatgaagatgaaagcccactgcccagacggcatcagtatttcacctgctcagtattgcacagaaaagtcttggtttgacttacagcctgctcattgctggaaggtcacagcactgttttttgatggagttttgagtagtcattttttctagtgctttaaacagattaaaatgtggttttatgggtagtcatttcctagatgcttgtgaaaacaattctaatcctaattgatggtagaaactgattcggagactcagtaaagaaagacatctgtgacgttcagttcaaaatagttaattattgattgatcacccaccagcattagcttatagatacacctgaggattaaacatgactttctggaacaaaataacttttttttttcctaaacataatgtacaagctgagcttaaatgagtgaaattataaaaggagataatctcaattttgccctatataagaataaaatatcagtcaaaatatttaaagaacagagatttctgtttggtgcaattttctggttaagaggttaatggaggggaatggaaagttattgttttatggatgcagaattttagttttataaaagagttctggaggtagatggtggtaatgattgcataacaatgtgaatatatttaataccatttagctgcacatttaaaactggttaatgcctggtgcagtggcttgagcctgaaatcccagctcctcaggaggctgtggtgggagaatcacttgagcccaggagttcgagacaacagtgagctctgattgtgctactgaactctagcttaggcaacagagtaagacgttgtctattaacaaaaagtaagaagaaaagaaggttaagatagtaatttttatgttatgtgtattttactacaatttttttttaaaaaagagttaaattggaaacaaaagtcttttaagagccttttggtctgagctttgacttaataaatacaatattaaatgaaattgtgcatttactaaatatttgagggacattattctggaagccaggtctcattttctaggactggagaagacagaatgtgttttggactcaggatgtgtttgtgaaagagcttaaaatttctttaggtgattgtgcattcctgtgatatgcattttctccaaaatgtacagaaagaaaaataatttgaaccctaattaattgggttctaattggtctgtgttttaggctctaaaggatcttagatcctttagatctttattaaatactggtaattcagtatttaattgtaactgatttttatgcaactgcgcaggagaagaagtgttcaggtgcagctttcttcccatccgtgccttccctaggccattgtgctttgtgttcttaagactcggtgaatgtttctgaaggtcagctagagtgcagaggagaattaatattaaaatgcatttaataaataagctgtcagatgattcccgaagataccataagcagcagaaagtcttctttcctctttcattcagatcgctgtgtacagagggaatgatggttaatatagtctctgttggcatctcctaacgggctttggtaatcatttctagcccagccgtgctccacggatttcatcactcttgagtgacggggccattttctcacagaatatggaccctccctgaaaaagagggagcagaaatagtcatctagcagtgtaacagttagggaatagaaagaaaatgacggattttgcagagaaggtctgcagaaactgatccagcatccctggcagtttgagtagagaatgggattttggtctttactttgaattgtcataattatttaatgtcaaacctatggagtgttatgaggctgtaagattttgaactctgtgcccttcagaggctctgcctcaggacacaaacacaggaagattaaacattaattaaagtaaccacacaggagaataaacaatgtaaagaagtagaaaaagacctggcttccccaccagggtaagccattttagaaagagagattttgtattgaacttacgagatggatgaaataggcttcactagacccaagggcatggagtaatttctcaggaaagtattctgccattgattcctggaagaaaaattagaaaaactcagtggatgatggaccaacccagaggccctaatggtacagagagaaaggaaacatgaccatgttcaagttacaagttgtagctgaccttgatgtttatcgccagaccgtgggaggttttggaatctgactgatgtctttcttccctgtagattgttattcagtgcctcggatgtgggcctaggaacctgtatttttaaaagattatctgatgtacagccgggtatgaaaactactgatcaagatcaatagttttaattaaagtcagggtggagggagtaggagggagggaaagacagagggagaaagagggacaatgaatgagctttggattcctttgttcaaatatgatcatctgagaaagagaaattctgaactgtcagtcggttcagagcagagctctgctggctgaattggatgtgggagatttttcttaggttcccagggccacagaaaggaagcccatgctgaataatccagatttaagccttacccattggccttggatgcctatttctgtcttccttgtctactactgtcactgtcaaccccttgtggctgttccatccccatgtgtcagctctttgtgggctggtttgcccccggaactattgctctgagttcttctgtccattccctgctcggctcagtgggctcctgagttagcctttagcatgtcacctttctggcatctccatggtaccagaacctttacttttcacgtgggctccaaccagcagcagctcccaactaggagtgtcccagcctggtggaaaggactggacacacaagatgggtcggaattgaatattaaatgaatttcaatacttggtgtacctttgtgaagtagcacattgattttgagagagcattgactttaaatctgatagatttttttgcaagcttcttttcagcaaatggcttactgtccttccatttgctgaggtcaaactccttggagtcattcttaattcctttctgtttttcacaccccatgttaaaatagtgaatcccttaacatatgtaaagaagccatctctttcccccacctccattgtcaacatctgggtctgtgtcaccaccatgtgtggcctggattattgccacagtctactaatttgtctaccagtttctgcccttgttccttgagtcttttcctaacatagtcatgtaatgatcctttaaagatatgactcaggttcctcccttttactcagaactcctgtctcttagagtgaaaaccaaagactttatagtgtcctacaaaaccctccatgacatggtgtttcccatcaggatctaccttgatcttagccaaaagcccaagaagcgatcttatcctgatctcacctcatctccaacttatttgcccttcagtcactctgctctggccataatttcctcctttactcacttggccaagcatgctgctgcctctgggcccctccctcatttcctctggctgaaagatgtttttgtaagttaggtatttgtatggttccctcacttttcttcaagtctgaccaattttgccttattagagtcagtttcagacctgcctatattaaaatggaacccctttgttaatttcatatactgttttccccttaccatgctttacttttcttcactgcacatttcatcatctgacattccactaatttattttattggtttattatttataaagtgctaacaaatactttaatccaaactctttgggggcagggcccacattttgtttactgcagatccccagtgtttaaaaagaacctagcacatactaggtgttcagaaagtatttcttaaacaaatgtattattagtaaatctgagttttaaatatagttttgtcacttcttaattatgtgacactcagtaagttacttctcagattcaagttttctaatgttaaaaataaaggtaacttccgtttcatggagttgtttttcagagtagaactaacgtttaatcttcccaactaaagtgtgagatcaaatttgcactaaaaatatgttattattattgctgttgatgccgacgggagacagggaaatactgggtggaagagggcggttcccttacaaaggctccaccctcaagcctggatatccctgtccccaagtgagaacagacattcctgttttcatgcacaaaatgttgccttttagcccaccatgccccctatcctatacccatataaaccctgaaccccagactccagaagcagatgaggagacgaacagatgagaagacgagcagatgagcagacaaatggcagaatgttgcagcagagaaggagagaagagaaagagcgcctgaatgtcagcaggagtttgtctggagatggtcagaaaatcaggtgctggatggccaaactccaggggaagatcatcttcccattccatctcctgtctagctccccatccatcctgctcagagccacctccaccacccagtaaaaccccacatgcaccatccttcaagtctgtgtgtgacccggttcttccaggatgctggacaagagctcaggatatgaaaggtgtcacgctggccctctgcccttgcaaaaaggcagagggtccactgagccagttgacacttaagccatgcgtggatggcaaggctaaaagaacacactgtaacatacacccaactgggctccgggagtcacaggctcccatccctggacgctgctgtggggccagagcccagcatcccaacccctgcacctgtccgtctgcatgctcccactcctgtaaggggtttgagcgatggtggtgactgaacagacaagccaaacccctgttgcaggtcctgtgagagtcagggaacccccctgtttcaccgttgttaatattgatagagctttaagactgaatttattcagacatggatagaatttcaatggaagtggaatccaggaactggctttaatcctgtgtgacttttctagaaagaaagtcttgattgcctctattttacttctaaaaaagtgtaggctacctgctaatggctcccagatttctgcttgaatgatctttgaataagtaaagacgttttggatgtaaattttcccattgttcttaagcaagtcattaaaattaaatataactatgaatggagagtgttttattctttcaattacatagggtttgtgaagagtcattctttgtctacttatatttaatcaacatgcaatattttatgtgccttattaccatgtgttaagaaggtaatattcacgttacctagctattttttacattagccaaaaaaatatggttatgtgcaaatattgtgaagaacatgcatgcaagtagtttgcttattaaccaggtttggtgtcagccacacacttataaagctaataattgctagctattaatattataactttagttcaaatattactgatgtctgttcttctaagactgaatgttaagattagaatttagaatttagtacaagtatgtataaatcatttcaacagaaaaaaatgaatgcaaatcaggaaccagctggaggcagatttgcatgattattttaatgctgtgacaggacgtgaacactcagaaattcgaattaggatgcttatttctcatatctacaatgagcactgagtctctcttatgatgtggccagctatcaccctgtgttatcagcaaaccctactaatagaaatttgagagtctaatatcaaacttactcttcctatttgttttctctgagccctgggttagaagactgatatgaaataagcatttttactatactgagctatacttatcatttacattattggtgttgcttagaaattactccacaggttttcaaaagataaatcatgccatttgattatcagcaaccatttgtccaatcagcacccaaatgcagtgtactctttgcactgggcagccactcttaagagagatttaagaagtaacaaggccatttttgtggataagtctagacaatagtcttttctgtagcatgaaactaatatctggtcttattgcatgatcatttttcttgcacctgctaaatcctttagtgccattcataaaacttttcataagaatgacttcatagaagtttctattctttttagagatatgattacctatctgctttcagtttacactattgcacttgtgtgtgtgttgtggggggtatcctctggtcttgtgcaattattttcattttagttactcaaatgaattgctgattaaaaagtaaattttgatggccatgtaaattggagatgattctggcttaaagggataactaggcaggtatttttgaaaattaataagcaaggctatcactccacataaacaaagcgattttttaaggaacagaacacttgatatactggttgatgcttcagtctggtgtggtatttgaagagcataaagtcgtaacatagattttcattttaatgggagtgttgtaataccttcataattttttttttttacttctcattagtttttacaacctacgaattacctaaaacaactttagtcatttgaattttgacttgccacttattttactatgtgcaaaattgtcccatttgagaaatggaatctgtatgtatggtattggtgtctatggctagacattaggactattacagagtttgcagatgtcactatgtctaatgcagttctaatgcagatctgtttggggttttgtttaatatatggttatggagaagtctagaaaggaatgacaatgaagtagtagttactgtaaatcttgtggtcacgtaatgaaaatttaggagacttttctgtacaccactttagctctgctctttgtagattgactcatctagaggagattttgtacaaatttttttcagctaatttctccagttcatttgtttattgatatagtattacattattatttagttaagcaaatggtctacaccacatgacttcaagcctcaatgtcttcttttttgttgttgatttgtatactaaatttcagaaatggctttttatggggaaggttggagacaaataatgactatatacacatatatttcacatatatatgttattgaaacatatgagtgtcatatatgtgtaagtggatgtagacaagtaatgagtatatatacatatacagtcatgtgtcacttaataacagggatacattctgaaatgcatcattaggtgattatgttattgtgggaacatcaaaaagtgtacttacacaaccctaggtagtagagcctactacatcatacctaggctatatgttatagcctatgacccctaggctacaaacctgtacaacatgctactgtactggatactataggcaattgtgacacaatggtaagtatttgtgtatctaaacatatttgaacctagaacaggtacagtaaaattatggtattatagtcttatgggatcagcattgtatatgcattctgttgttgaccaaaatgtagtgcatgaatatatatatatatatatatatgtatgttactgaatatgttatatatttgttattgaaacctacttttattattatatatatacatatacataaatacatagccccacttcttcagtcatgtgaagttacgcctactgatacgtgtattagtctatcttgtttcttcttgccacttttctctctactctgagcccattcacgtaacccattttaacaattacttatagattatttcataatttccttattttagttcatttctaatcattaactgtgttattgattaccccttatgtgaaccaaaaacatctccataggggcatttctttgagaggatcagttctgctttattaaaggtaagtcagcttatccaagtcaccagaactgagttaagaaacatatggggctgggtgcagtggctcacgcctgtaatcccagcactttgggaggccaaagcaggaggatcatttgaggtcaggagttcaagaccagcctggccaacatagtgaaaccctgtctctactgaaattacaaaaattagccgggtgtggtggcgcatgtctgtagtcacagccacttgggaggccgaggcaggagaattgcttgaacccaggaggtggaggttgcagtgagccaagatcgtgccactgcattccctcctgggcagcacacacacacacacacacacacacacacacacacacacacacgaaacatatgggcaatccaggggattctagctcttcagagtttgcccgggactaaaaatggcagtacaaaattgagcattggccctttgagatcactgggagcaaaccaaccaatgaggaccacccatgggaacagatggagttcagaactggactttaaatcggggctcactctacagagggtattgtggctggacagaggatgctcattgcatgaaaaggaatctgtttgtctgggtcagtggggaagagttctggtgtgtcagactgtcttattttgagttaaaagttttacaggtaaagatttgctttaattttctactcatgttgtccagtcgagtatggccatgtgtgcttctgtctctgatgagaaataataatgataaagatcatgagagcagcaggtaccactctgacaacgaagtgcccttctctgtcctagttattttaaaggtagcacattttttttaatcctcgcacaaccctgtgaatccatattgctttcttccttttacagataaggaaactgaggatcagagaggaaaaccaacttgctcaaggccaccaggctagttagtgttagacccgagactcaaatctaggactgcaggacttcctatcccaggtcaacgttatctagtgcttctcgacattttgagatcagtttaaatactccttattgtgcttttcttgtggatctgcaggcactgggtctggcactgaggaatcagcgatgaccaagacttggtccctgcttggagaggttcacaacacatgcaccattttattggaacatcacattacattatgtttaatgtgacataatacgagctccagatgaggagaccttttctttattttgttcttaaaacagtgcctggaacatagtcagcactcaatgaacatctggaaaacataaaatatgtcacgaaatcctgtcatggaggaaagcactctttgctttgtctgtggtttcatctgtgcctcactctgaattttactctgggctcctcacccctgatgcatttgcccacgacctcctggcatgccttgctgcccttagcattcattctgcagaaactttatggagcacatactgtgttctgtgcatatactgccagcattgtgctggcattagggacacagagacgaacagaccagacatggtccctgccctcttggaggaacacaactgctctgtacccatgggttctgcatccatggattcaactaaccttggatcgaaagtactcagggaaaaaaatatatgtctgtactgaatacatacagaccatttttccttgtcattaagtctgaaacaatacagtataacaagtatttagcatttatatcgtgttaggtattataagtaatctagagatgatttaaagtatacaggaatatgtgtgtaggttatatgcaaatactatgccattttataacagggacttgagcatctgcagatttttgtagttttgggaggtcctggtaccaatcctccacagatatggagggaccactgttctcttatacccagttctccttcatggttcagaatttagctcagctcttcacccacacacattacactcttccacccactgccccatgtcattaataggattgattcttaagtgtgtgaatggcagtcagagcccatgcacctcaactctgacttgaccagatgccacaccctggagtttctccataaagacctcctgccgtggattctcatccacttctttgagcatatggaatgtccatggtggaaagaagcagacaggtctaaataaacccattgactactgagaaaagaattaacgtgtatgagacccccgactatgtctcaggcaatattctagggcttttcctccttcattccattctcatagtaatcctgagggaaaaaaaaagcagtattttctttgtttttctggatgaggtccactgaggttagtggggtgtccaagcttggagagctagggagtagtagacagccgagataaggaatgcaggtccgtctttgtacaaacctgcttatctccatacaaacctgccatgtattctcaaggttatgagagaaccagggagggctggagactgagctgcctggtggtgcctatttatattcatgctctggaaattgtacatgtaactcattactgtggtcatctgctttctgcagcctcgtgaggggcccttctcatgttcctctgtagatttatgagcttgtacatggcacctccattctacggcagtttttagagttccctgaggattcttataacaatcacaattatttaggttctaaattacccttgtccagtgttaagcagatgagcagtgttttcaccttctaaacaatgattcctgaggcaactgctgccataatatcacatttcgtttccaaggaaactgcatatccatcccttcctcccacccttcccacttccttaagcatgagattttttaaaactcaaaatgtgccatttcaacctcttgttactgtgaaagttttagttccggcattggttcctaggaaattacagttttccttctgatcttcttcttaatgtgttggatgcttttctgcagaaagctgtgcattctaaatggcattgaaataaattactgccttcattatgacacacaatagatgaatgtattctacttcagagtcacagcttctttagccaaaataccttggttgttttccatcctgaagttctataattgcttacttgatattccattgtgagatctcagaataaagtaaaggtaggctgtggtatatatgtgtcttttactctcaggctgtacgtgcattcaagttacctgactggatggattcagtaagtttgtaccctccagataaagtaattactgaaactaagcatccattttctatagattatgttactagtgactaaaaaatatctccagatattgtataaatcatggaattcaggcagctatgtttactacaagtggcagtgaagcatttacttactccaaaggaactctggagtactttgcaatcctgctggaaggcaggggagatgtgggtggccacacagagtcagaggatgtcaacatgcagacatctgtgtaggcatctgagttatgctgatcgaagactctcttctcactctttagtttccccactccaaacacacacacacacgcacacacacacaaacacacacaacctcagaaaaccgtggtgagcagccctgtgtctacagatacccactcctggcaatgtccatgtagctaacttccggtcaccatgtccgtcccaggattgccttgagcctctatacctccctccagcctccaggcttttgatatagagacctagacatttggattttgtttttgtttttttccagaaaatctctctgagactcaacgcttaggtaatgtggaactcagaacctgactattttttttcaaagaaaggagcagtcatgaacagcctatgaatagatataagtagatgcagaaataatctgtatgggccaggcgcggtggctcacgcctgtaagcccagcactttgggaggccgaggtgggtggatcacgaggtcaggagttcgagaccagcctggctaacatggtgaaaccccatctctactaaaaatacaaaaattagctggttgtggtggcgggtgcctgtaatcccagttactcaggaggttgaggcaggggaattgcttgaacccggaaggcggaggttgcagtgagctgagatcacaccactgcactccagcctggatgacagagcaagactccatctcaaaaaaaaacatctgtatgtatttagtaggtaagggtgaaaatgattattatagtgtgtgtgggagtgggaggaaattagcccatgtactattggactggtgatgtttctaagggattgttgtatatgcgaaattgatcttccatttacctactcttttaagcacttgggcctggtcagttgacaaggtaaagttgacccttgaacaatatgggagttaggggcactgatccctatacagtggaaaatttgtgtttaacttttgactctcccccaaaacctaactataatagactactactgactggaagctttaccagtaacataaacaattgattaatacataaaaatgttattaagaaaaccataaagaaaataaaatgaattcattattcattaactgccagtggatcatgataaaggtcttcatcctcattgtcttcatgtagaggatgaggaaccagaagaggacaattggtcttgctgtctcagggttgtcagaggtggaagaaaatccacatattagtgggcctgcacacttcaatcccatgctgctcaagggtccaaaggaactttggagtactttgtaatcctgctggaaggcatgggagatgtgggtggccacacagggtcagaggatgtcaacatggagacccctgcataggcatttgaattatgctgtactagcttctggtgggcagcaggcctggagccagtctctctggtagagttggatggggccaagagggtataagtcttactccttcttcccataggagaatggaaagggagcttccttaagggatcctggccctgcagggctgtatggtctcacaggcaagggtgcctatctgctgggagaaaatgctttgtgtgctcatattcatgcaagtaagttcttagattattgtcttacataaagtgatttgtaccctttgcctatggttaccaccaccacccctgtgataagtccatagcttcccaaactccaggcacatagaacctttctgccttttttggatccacctctgtatgcagtggctctggacttcttggtgtccccacattggtctgggctgaacctgacaggccaatagacaagggagtgaactatggatgtactcaagttcattaagtcacacgtcattgtgcttagtgaatgtggcaatctgagacaaatacgccctttgatgaatagagagtagaatgactaataagagatcagaagccagcaaagagtaaatccaataacaacaacaagaatgtagagtttgaaatttcttaagtttaaatgagaatgttagcttattttgcaaatagctttgtctttttctgacccctcctcccaccatgtggaggtatggaggagagaaaggctcttgcagaaaagtataagcggtgcaagtggagagtgctgcagagatggagatggaggccaggtctgctggtgaagggtcttatagtccaggctaagatgttaagcataccttagaggcatgaaagaatctctgagggccattaagtggggaccgaaattctaaaagctcaattcttagcctggttgggggatcaatttctagttattggatcacagtggactgaattctgagagctcagtgtgacagataaaggaaagtttgtcagatggatactgttttctttataagaatcttctgacttttggggtagagtttaacccctcattttaaagcaactcattatgtctcgttggtatttaatgaaacgaaaataatgtagtatgtgacactcatgacatttcacctgtaaagtaatttatggtaatttgtcctagagtgttctatcataggttgataggattcaaggactatatacttgttttctaccctaatagataggagggtggagtaggatgagaggcaggctcagagataggaagaaaggattttttcatagcaatgcaaaactgttagaaaagtgcatggtactccaacctttcagcctagtgacttcttgctgccgtggagtggctgcagtttccttctttgcaagtttggagcatacgcccagatgctggaaggatttggtttacattatattgaaaaataaaacaagacaagtcaagtaaaacaaaacattagcaaataaaacccataagcaaacacaaataaaatgatttagtgaggtaatttctcacaaatttcagaatttcccacaatcgtacagaaatggttcttgcctgtggctcacatgggcttcaagaatttaatttacccgtgttgatcagatgtgtaaaataatggttccatcattggttgcaaaaacttcaggtgttggattttggaagtatttacttacagaggtctcatcattgtaaggtaaagctttttagccatccaggccaaatggtgggattgagattccatctgccattgttcttacggacatctaaaaagagcaagaaaggggtttttatatttatttgatatttatactcccatccccagaagcccatttaaaaattggtattggttctggtagcagaaaaagtggaagtgaaattagagtatagaaacttatttctcaaagtgtggtctgcagactggccacatcagcatcacttgggagcttgttaaaaattcagagttgctggccccacaccatctcactgaaccagaaactgcattttaccatgatcctcagataatctgtctgcacattaatgtttgagaaccactgaatggggaatacctttttaggaagcatggtcatgaagaaagtggagtggttgtggagaaggtcctagctagagatggagcatgaggtcagggcatttgtttgtcttaaaaaaatttagacaagccttgagcatgtttatacttgtggagaaggagacctttgaagtaaccagacaccaaaagacaaataccatatgatctcactcttacgtggattctaaaaaaaaaaaagaattgatatcatagaaacaaaccgagtagaaccacagttactaggatactaggaattggggaggtatgggaggcgaggaggatggggagaggatggtcaacaggtacaaagttacaattaggaagactgcgttccggtgttctattgtacagaagggtgacagtggttaacagttaagatgtgatatattataaaatagctagaagataggcttttgagaatgtcctcaccatgtataaatgataaatacatgaggtgatggtcatgctaaataccatgatttgaccattatacaacatatatatgtatcaaaacatcaattgtaccccataaatatgtaaaattacaatgtgtcaactaaaaaataagaaaagaagttgaagagaaagaagaggtggctgaggtccctggggagctagagggctgagatgtggtcataggagggaaagtagactaaagtggatgaatgacacttgttctcctgaaatgagagggaaggaagagcgggtaggctgcatgtaaattagcttgtgtattgaggaaactggaaaattgagagtagtaaaaaatggtgacttatttttaccgatgatggaggtggagtcactttttgagcataaaggggcagacctggtcatgggatttcagaaaagttcagggccccttagaaaaacacactgatgggtatgggaaagaacaggtgggggtaagggggcctgagttataggttgctttggtctcccccttgtacaattcaaaacacctttcagatatgtagaatggaagaagtacccaacattgatgtatattaaattccagccctgaacatcatataattaaagaaactaatataatactgatataaaatgtgggactgttttgactgtattggtactttctttttcccaaaaaggcagagctgcttttgcatatgaactcattttcttcaaaatccattatcctcatgtgagagatgtagaattttgggcacagaaaacatgacaaattttgcctgtagtcctgaactgagattggtaccaggctctgctggcttccagctatttcatttcatgatttatcaagagctgctctctagtcgacttggaaaaagagtttttgaagagtcctgctctcacaggacatctgtgagaatgccgaaggagaaggtaaagagaggcacgcttcaatattttattatctcaacccacagccttaaaggtctcctcgattgtctctgcctacaggaaggctcagctgctttttatcattccgttggggccttgtttcaggggcttgtgttttggtaagaagatgttttgtttctgaggacagctggttaaaatgcactgccttaactggaatattcacaggtatgttcttctcggcactgtgaatcatttttcaaagcttttcatggcttctgctctttgatcaggataaatcatgccacagtgagactggaatccactttcatagactcccaggtgtccttgttctcacccactggtctttacttctctgaagagcctgaccttatgaattaaattctttccgattgtaacattagtcagaggaattggggaactggggacttttgtttattaatccttttatcttctgcttttttgcccagaaaggtcatttttcaatttccccagaaggtaattctacttctcttagtaattctcaacaaatgctaagcttaggacatttatataaaagccagaataaacattaagtttagaagtgtcatataaaaactagaaacaagcttttgtgcttctgagtataacttaaattaggtagaaaaaatatctaataataaaagtagattcttctaccctgtgtagggtccacaaaggaaaaaatatggcctcttctttttaggagtctagatcccactttctcaaagtgccttccttcatgtgtagccaccccacttccagtctacattggggacccccaccattagaaaatgtctttatttatttatttttaattgtcaaaagattgtatatatttgtcacacacatgttgttttgaagtgtgtacattgtggaatggctaaattgagctaattaccataagtaccaactcacattaagcctcccttctttatcttctcttagcgtccttgatttcctccacaacatttaacataactacggtatatttatttgaataaatattggtttaactgcttcctccctgccaccccagactctgagtcccatgatggcaaaagccttggtagctgtagtagatactacatatatctttgtggaatgaataataataatactagtggagaatatttgttgtgcttatgatgcaccagggactgggctaactgtgttactcatcctatcttactgatcctctgtcttagcctgcttaagttgccataacaaaataccatagactaggtggcttaaacaacagaaatgtgttttcttgcagttctggaggctagaagttcaatatcaagggtccagtgatttgatttctagtgaggactttcttcatggcctccttcttactgtatcctcacgtggtagagagagagtgaacaggttatctggtgtctcttcttacaagaaccttaatcttataggaccaggtccccacacttctgacttcatttaattttaattactttcttactcctaatatagccacactggaggtcaggactcccatagatacattttgagggaacacatagcaatccataaaacccacctaaccaccctaatgaagtaggcactatgatcatctctgttatacagatgagaccctaaggcttagaccagggagctttctcaaggtcacatgagtaagtgaacaagctggggcaaggttgtaggtcttatttactcaaatctgggttcataaagatataaagatctgaactggttacatatactttctgtttggaagaaatgtaatctgagatatagagtacgagcttaaaggactattatatatgcaaggaagaaagtttataggctaaaagagtggttctcaaaccttgcgttttaggacccttctacattcttaagaaaagtattaaggatctcaaaaagcttttgtttatgtaagttgtatctgttgatatttatagatagcattagaaattaaaactagaaatatttttaaatatttaatttatttcaaagtaataataaacccattacatgttaatacaaataatatatatttatgaaaaataattatatttcccaaaataaaaaatttaagacatttaagacattttttgcaactctgtctcaggtctgtcttaagagaagacatagatatggattctcacatctgcttctggatttactctgttgcaatatgttgtattggtaaaagtagatgaaaattcagcctcacacaaatgttattggaaaaaggaggagtatttgatcagccttttcagataattgtggacattctgttttgttactacagcaaaactccaattggtagttttctaaaggttagttgcgatgtgaaatctgaaacggaatcaatgaacttttcatattctgttactttgaaatccactggtctagcttgcactttgaatggatttttcactcatgcatgattttgtaacatcttgcattggtcatttgaaaatatcagttcactgagttaatacagatctttgagatgttgacacatttcattatacaatatccaaaaatcacattccttaatattaccactcaaatatctcatcagaaaaggctttatgtactgggaagctttcaagcccatgatggcagatgtgagttttacaaaatccgaatttttgcttgaaaacaaggtttttatcattggcatcaatgactattagttgtttttcttaaagtgttaagattatttcattcatttagaagaaaacatctgccaactgcccacatataaataactttacttggttaattttcctttcaggaaaaaattatgttcatgaaaaaagcaattatttgagtttgcaactcaaacaattgcacaagtgcttttccttgtgacaaccactgtatttacgtgtgtagtagaagtgctttatacattttcccatttcatcacacagaatattaaaaagaatgtgtactcaaggtttaataaaattaataattcttacttctccttcaaggacattcttaattgaaactagtatttattttattgagagtacctggctgtgaagagtacatggctgtgaagaacacatggctactagcacagtttggagccactgccttaatttgtgctaaggcgctagcaattttactgaccattgcttttgtatatttggtgcaaatgtcaacatggttaaaaaaataaaaggcaaatacactttagtattctcacaaagacagttttgaccttgtggttccctagtaaggtcttagggagctcctaacatcccctactccccaacattcctccaggatcaagggcttcttccatgagcatgagttctataaaggaagtcaggaacaagcatgggcttggttggactgtacagttcaagaattagggaatttgaaggagtatgggtgaggaatagggaagccattaactgaggttggtaagaaggagaaaggtttttgcaaggagtcttagagctcagaagctcagattatgaggtgatttctctttaaggaaaatcaggagtttctgtaatttgttgagacaaaaatgacactgtccatgtgtttccttatctgtaaagtgggaatataagagtattattattgtgtgaattaatgtataaacagcttagaacagagcttggcacacagtaggtcctatataagtgttattattgtgaaaatggagttttgctctagttatatgatgaattggagcagctgttcttacacttcagtcagcagcagaatgccttggtgggattgttaaaatacggattgctgggccttgcttctggaatttctgactaaggaagtcggagatggggccatgattttgcatttttatcaggttcctgggtgatactgatgctgctcctctgggtagcacactataagaaactgaatcacaggaattcacacaatgaatactataaatatcaatagatacaactcatataagcaaaagctgtttgagattctcaatacttttttttttttttgagacggagtttcactcttgtcacccaggctggagtgcaatggcgcgatctcggctcactgcagcctcctcctcccgggttcaagcgattctcccacgtcagcctctcgagtagctgggattacaggcttgtgccaccatgcccggctaatttttgtatttttagtagagatggtgtttcaccatgttggccaggctggtctcgaactcctgaccttaggtgatccgcccacctcggcctcccaaagtgctattacaggtgtgagccactgtacctggcctctcaatactttttttaaagagtgtaaagggattctaagatgcaaggtttgatgcccttttctttcctagctactcaacaagccaatgcctcttattcatatccatgtatggaaagtgatgtctacttattctttcacttgttttcatttaactttgctcaagaactgaagtttaccccgtgtttttatttttatctgaacaataagctgggactgtaactggttcagtatttatattttttctagcatgtcctattttgctgtgcctaattgctattaaagccagatggctgggttccaaaaacttgtctgatttgccaacagttttactcacctgaacaattttcactggctctaagctccctgacttatatcacaggccatcattgccacttttctgaacttgccagaggtcttagaaatgtagactagttgttaagattgctgatgaagatgtgctaaatgaagagtgttggtagtttgatgattaccaatgatgttgattttaaatcctacattcacttaacaaatatgtgtgtgccaactgtatgcaaggctttgtgctgaatgctgggaaccaaaccgaggaaaaaatatgcatggactctgattgtcagtctgggagacactaaatcaacaggcaattataaaacagtacaatgtcacaatgtcaagggaagggcaggaagataattgggctgaaggggggatctaatccatggggggcagggaaggctttctagggtaagtgatgcctgagctgaaaacttagaggaggctttgaattcgttaggtaaagaaagcaggcaaaaagcatgacagtatcccaggctaaaagggacagagtgtggtaagacctagaggagaagcagcacacaccactgtctttgagaagaagtttaatttggctggttcactgagtgtaggtcaagatggggatgtagaaggtaggaaatgacaagagggtagaaagattaggcaggaccctctaagcctttggggtttctcagccttagcactatcaacattttgggctggataattctttgttgatgtggggtgggggactgttctatgcattataggatgtttagtagcatctctagcctttgtcctaaataccaagagtgactcccatccctccagttttgacaactaaaatggtctccagatatttcaggtatttccaaatgtaccttgtggaagtaaaattgcccctggttgaaaacaactgttacagagttttgcctttatttatgtttttgttgttgctgttatttgtttgtttgttctgagacagggtctcactgtgtcacctaggctggagtgcactggcacaatcagggctcactgcagccttgacttcccaggctcaagtgatcctcccacttcagcccccaagtagctgggactataggcatgtgccaccacacccagctaattaaaaaaaattagtagatatgaagtcttgctatgcttcccaggctggtctcaaacgcttgagctcaagtgatcctcctgcctctgtttcccaaagtgctgggattacaggtgtgagccaccatacctggctttgtctttatgttgagaacagtggtgggcaattataagattttattcaggggattgacctaaccagatttataccttttggacattcatttatagtaacagtatggaaaatgaacagagggttggcagcatttgaggcagggaaacaggatgtcactgttgcagcttggatgtatctaaagaagtggctgtaggaatggagacaactatgtacacttaagatataattaggagatagatttaacagggtttggtggctaattggacatgaatggtggaggagagagaggaatcaagtctgcctcaaggtttctggccttggtcctgaagaagatagtggtgcttttcactgatgaagggagcacaagaggagggacatacttacttggaaagtcaggagaggattgctggtattttagatatgtcggatttgaggtgccttgtgacagccaagtggagattttcatctgtaggtagagttcggtttctggaacttaggagacagaactgagccaatcagcaactagagggtagttgaaactctgggcaaggctaattaagaaaggctccactgaatgggaaggcctggggactaagagccggtcctgggtgacaccaggtagatcatggcaagaggtggaggggctggtgaagaggagatttcagaggaggaaatctaggatgtggcagtgtcagacaagttcagaagagttagctctgtgaagagaagcaaagtttccatccatggctcaaattcttccctttccttcaacaaattcaagtttcatgtggttctagatgctcattagggttcttctgaaacgattggatcctccaagacatagaaggttatgactggttataaaaattgccacatttacctctggtataacccaaatagaagctctgcatcataaaatttagagttgaagacagatgctgtaacttaaaaggattgatgctgggccagactgctgaattctgtagaggctttataatggagacacatctttctaggcagatatcacttgtcacttccataaggaaaattccctggagttgatgagtagtagagctgtgcttctgctttataaaatccacttttgatgaaaaattaacattttaattcagaggtgtgtagctatcaccaaagggttatgatgtcatgtaactaagtctcagataccaacattgttcaatattgtataattttttccagagtggtatgtgctccagataactgacctttgaaggtagtaatgtattatttacatgaaactaaaatccagtgcattctaaatggctgtgatttatcatgaccattttgaaattgggtcctgtggccatatgctaatttgactcaaaggaaattctgtgctgtgtgcttggatttcatgcttaaaaaattcagcaatagtttcaatgctcttttaattaaaataagatgctttataacatttcccacatgatgtggaatgtactctgtagctcatatatgaattaaaacccttagaagatttacattttctggtctggcaaccttcatttttctaatttatgtgtcctgtttgtcctgaaggagttgggaagttgaaatttacagccatcccaaatgagagagttgagattcttgattaaatgagagcttgtttgtgtattcaaatggaaaaatgtgggtggacaaaattaaatttgtagtgggttatctcctgaacagttttctctttcctggtaatttcacactgcccaactatgcacatggtaagtatgggagaaaacttttttgtataataaaactttttagcagtaactgactggaccatggttgggcatctattccaagttattctgatcagcacctgcatctgagactttgtaattggctctatcatattcccagtatgccttttgtgtgtggccattttctgctatgtaaataggaaaactgaaaaatcaggtctgcagaaattgaagaatgaatggggagaagcaaagacaagcaacagagagaaagaattcccagtcattcctggtgcgctgcagtctccagtttctgtgagtttccaagacccagctcatccatgcctttggggtctttgaaagatccctctatctttcaggggtctttgaaaaacccctgtttatttcaaccagctcagatggttgcctgcatgtgggagcaatgaaataacctatattgcttagatttctattttctgattagatggtggctaccatgctatgtgtatattcttaaaacaagcccttgtacataaattagataatattggatggttttggttgagctggtctttggcttaaatgttattgacatttttctgaaaaaatataataaatataggacatgtataatctcacacaagtttgaaactatttaatagactcttaaaacaaaggaagggtgtctatgtagatgtgctgattggttccaggtctaggaatccaggccatttgcagtttgatttgtggagaaggaaaagagactacaatctctcagtggtggtaaggaggcaggatggagtggggaccagaaacgcctctgagatacaatgtcccaaggtccagtgtttttatgattgggaggaagactgctctaaaatctttgacatttgaagattattaataataaatgtcctcactaagttcctctgttcataggatagtaatacaaaacaaattgtaccccaatgcagcagtgtgaaaaaaaaagaaggaaaaaaggccaagattattaaattcttatgttcagactgagaaccagaaagcaaaagagagttaatcattgagttgtgtattagtctgttctctcactgctgataaagacattcctgagactgggtaatttataaaggaaagaggtttcattgactcacagttcgacatggccagcgaggtctcaatcatggtgaaaggcaaaggaggagcaaagtcatgtcttacatggtggcaggcaagagagagggcatgtgctggggaactcccctttatcaaacaatcacattgtgtgagacttactcactatcaatgagaacagcatgggaaaaatccacccccatgattcaattaccttccaccgggttcctcccacaacacatgggaattatgggagctacaattcaagatgagatttgggtgggaacacagccaaaccatatcacgttggaaactgaatgtataggtggtcctatggctagatgtcactgatgacaactgtttgcagtcttctgtgtctggaaaaaaaataatagcttccctgcttaggaagtcagaatataggcggtagggagaaaaaactgttaaaaaaaacttcaaagactggaataaactacatttttgtagagctactatattaaaatataagaggaaaaagaagtggaaaagccggggagtggaaatcgcaggcctctgcagaaaggagataaacaagtgcctttgggtgggatcatttgtgattgtaacagaaagacatacaaaaagacaagactatgtccttagaagcagagtggcaacttcaagtttataattactaagaacccctatgtacacagcatttggcatatgcaaaatatattggcagatgcattagtaaaatttaactatcgtaaagcctctgggagcattgacttggtaaagtaacagaatctccattaaagcaaaagtaatgaactgactcagcactcctgagtaaagtgaccagatgtcagaggtaccctgaaggacacagagggcaaatcaggtgtattttctggctacaatcggaagggtggcacagagagaaacaaaaccatgaatacatctttgatttcaggtttaactcaaaggcagtgatatttacctggagagcagaggaaagcattgatgcttccaagccaattctttaaagaggtgtgggtggagagtgtgtgtgcatgcatgtgtgtgtgtgtgtgtgtgtgtgtgtgtgtgtgtatgtacatacacacatatacaattagctccaaggctttaaataaattcaacacaagtatttattcagacctttgttgtgtaaggcctccaccaggtcctgggagggaatacatatgtgtgtgaagccctaagctttgtttaaataaagctaagggtcaaagaagagtgaagagcaccccacctccaccccaagttctctcccccagcctcttccagtcatggctcttgggaaaccctgcagtaggaacagatgaatgtgtgtataagtagttggaaagggaagtagagatgatacttagacaacataaatgagagaagtgtgaagtgtttgcagtcagagtacctattcccaatagcctgcttttcatgctgataaaaccattcaatcttggatgttgagttcaattttttgtcagtgaaaaatctgcccagagtcttaaaaaatgcaagcaagtcatctgtatatagcctcagagcattgtattttcaatgtactgatttgctaggtatatattgaagtggcctttggaccctgagtgttaaatatggagatctgaatgttcttcagttcattttaattgtgacgaaatcaactattgaggaagaacacacttcctgatatagtctgcagccttatagagagccaagtatgtcacctttaacatataattcaagttcatttgttctgattaatttgtggggagttgcaggattggaatttagaatattttaagtgaaattgttggattacggattaaaaaaattacaaaagtcaattatgtacaagttctgggctaggtcctagggtacatgccaaaggaatgtgaggatattcccagtcttcatttcagagcagagtcacctggagcattttagaaaactcttgagactcaggcagcactcagatcactggagggggcacttagctcaaataaatcagaatctgcgcagggggtgcccatgcattactcagttgtagagctccctcctcaccgggtgattccaagtgcagccatgtgtgagaactagatcaacagtctggaaagcttataaaactacttaacatcaatttaaatataaatctctgggcattagtctgcggttggtaagttttacaggctctccagatgattctgttgcatgtggaagatttagaatcagtggtatagaccctgctctacagatgattatggtcaaatgagggaaaaggtgacttgtgtattttttttggaaaattacaagaaagtttatgtttaaatgccaaaagaataaaagacaataaggagtgataagaaaatgcaagaggtaaatatttagtgaataaattaaaaatgatttgtatttagcatgtttattcagatggaaatagtatttttaaagtgtataaatttttagaaatacatttttattatatattttcactatgtattctactatatagatataaaattacctaataggtatacatattttcagggtacctgtgataatttaatacacacatataatttgtaaagatcaaatcagtgtaattggggtatccatcaccttaaatatatgtcttttcttcatgctagaaacattcaatttattatcttctagctattttgaaatatatcatagattattgtaaactgttgtcaccctactgatctatcaaacactagcttttattttttctatcaaacagggtgtttaatcaacttttatcaaccctttaatcaacctttgtttatccccttacccccactactcttcgtggcctctgctaaccaccaatctgctctctatcttcatgagatccactttttttttaattccccacagattagtgagaacatgcaattgttgtctttctgtgcttggcttattttacctaacataatgacctccacttccatcaatgtggctgcaaatgcctgagttatggctgaataatattccattgtatatatatatcacactttctttacccatttatccattgatgggcacttaggttgattccatattttggctattataaatattgttgccataaatatgggggtagagatagtagatgaaaacttaatcttcttatctgaagaattacttaaaattctaaagtagaagagttggaattgagaactagatagatcatttagtctctgatgatctgtctgtttgcagaggggagttgggtggaactgggtgctctgggagtactctgatggtagaaagagtcctttttattccactgtggaggtggggatatgtccttgggtgtggttttgagcctggatatccagaagcagtgtttctcaaatggcactattctgtatattcctattgcacgacgtgtatcttcttgctaaaatcaggcagtatcactatttttctatgggatgtggggaatatttgatagaaatattggtagaactttcttattttaagttttatttccataatcttctcttagccctttggtaactattactggtagtctcaagaaaatcgagtgagagataatatgggagatttctttagattttcatagcacttcatctgagtaccaatagccttggattcttatattaataacagtaccctaactcttagggttctttcgcagacttagatgaattgatatatgcaaatgtgcttaggaaaatgccatgcacatagtgagccctcagtaaatgtcagcaattctataacttcccttccactgctgttattcccaacgtcatttgcttcctgaactgtgggacccttgaggtcaggccagatcttttatctttatattccctgtctcctagcacaaggtttggtgcagtatcaacacccttcaacatgtgctgaatgaaggattggccagcttagatctgatttaaccctaaagaacttatgcagttattttaagagtattgtatcagtgtttcagtgattttctccctgagtgaaatgcttccaaatgccctgctatgttaacagtgcagagaatggctgctttagaagaaagagccccttgtacactcaatagtccacagcctccccctttaccttcctgatggtgggcaggtcactacatctccccatctacctccctgcttgcttagggttccctgacacacaggtcagccctgattcatcattccctacagaagactgaccttggggccaaaaggctggtggatatgatagaggggatgaggagaggaaatggatcagtgacattccagctggacacctgaatcccttttcaaaagagcatcttgttttgtccccttaggcatcccctaagggaaagttagcatgcagttatgaatgagaccctcgctgctgttttgatgttgtaaaggaggagggaaatctacaatggcattgaggaataatgcaagtgcatatatttttcctcccaaagaacccaaaagcatttccacctctatgttatctgatgctgctgattttatgcttcaaagaattgagaatgaatacctggcagtaagtactaaatctatgtgtggtgactgacagattaagcactagggatgttaaagattagaccacggatccccaaacagtgaatgtcagtgttattttccatcttgaaatggaatgaagttgccctcatgattcttaccacagccagcactgttatatcctcccaatttggttcttacattacttcactcttcagaacatcattcatttatttaaatggtatttcttgagctcttttcatattatggcttggttctagctacagagaaggatataacaaaatgtgagacatggtctttggacccaagaagcttctatttcaagaaatggaaaaataaggccgtaaaagtcatgattacgtgcttaagttctatgattccatggtgaaaggatattttgaagtacagggaacagcacagaaaataatgctacctttcaggataagtctaattatacctcttttgttgtcagcctgtgagagctgagggtttgtggcttttaattctcctttaggctgtggaaggcagtgggggtgcggaaagagtgtgaccattagagttagttctggattcaaatcccaactctgctgctttccacttgtacagattaggcagttgacaatatttcctagcagaactaaatacatccacatctttcagagatgtgaggaattgcactaatgatcacagctggaaaaatgctgttggagttgggcggatcatgaggtcaggagatcaagaccatcctggccaacatggtgaaaccccatctttactaaaaaatacaaaattagccaggcatggtggcgggtgcctgtagtcccagctactcgggaggctgaggcaggagaatcgcttcaggagaacccgggaggtggagtttgcagtgagctgagatcgcgccactgcactccagcctggcgatagagcgagactctgtctaaaaaaaaaaaatgctgtcgttagaaaggccttcaatagatggtgattgttataaacaatgatcactaacagtaaagatactgcttttatgaagctcatgcttaaatgataacttccagcaaaacaactccatttaagctgttttctttgtactacagaattagcacttttcgtccctctaaatagacagacaatatatcatggagaggtgtttccttcccttgaggacgcaatatgctattttatttttcattccattgacatttcttaagaattcccaaagaaggaagtctcagctggcctccttccacatattaagagagaaatgttactccattatgttggacttctgattcctctttctataattttaatagtcactgtgttgagtagtttgcactatttttctcatttaactatcctcagagttccacaaagtaggtgttaaccccattttacaaattggagcccaaattgcccagccagctagcaagtcattaagtgggatttgagctctggcagtctggctgcagagcctgtgtttctcactgtgatgctaggctcgcctgcctgtgtgcctgtcccaccaagctcagggctgcactgcctccacaactgctccttctgctcctgcctatataggctttagtgccatttgtgagaatacacagtaaaggtagtgtcttcgttagctttctgtggctataacaacacagattgggtagtttatcaagacaagaagtttacttagctcacaattctggagacttggaggtctaaaagcatggcactggcatctggtgaggttcatcccaagacagaaggcatcacgtggcaaacatgtgagatagaaatgggactgaccccactttgtcgacaactagcccacaccggtgatcatggcattaactcatttatgaggtctctggtctcatgagttaatcacctcttaaaggccccgttacttaatagcattactaaggcaattcaattttaacatgagttttggagggggacattcaaaccataccaggtggttacccacaacccccattcaaattgatggtaaataatgaatgttaaatttatcttctcttcagtattgattcccatagtccatattctttactggctgttagattttcaccttacatgctccaatgtgcctaacataaaatgatcttagaacctactttgtgaagatgctgcaccatcctgagatggcacaagaggaaccaggccctgagttctgctgctgtgcttcagggggggcctgcattagccatctctggctgttcccactcaagagtgcccccccccccaaaaaatagttcacccagaacccatgctagtcctttcatgcctcagggactcaggatcctgtaacccacttaaacatcacttacctcatctcagggcctaccaagacctatggcctgggcctgccctcctgaggtctgcctggcaccaccagtgggagcacccctagaccccagggatatacagtaactattgggatgatgctataacttgcaggctgtcctgatgatcattaaaacagtgattcagtatgaaagtgctttgcaaatgatgagatgtcacacaaatttagccactgtttggtcattttcactttatctttgaaagctcgtgtttatagctaaacatttggttagaagattaaagtctatgaaaagatttggatccagtaggtcacagcttactagaaacagaacagagacttaaaccatgtgcctctgtcttctggagttggacttttaccatgaggttgcttatctggatgaaatctgagggctttacagtctaactttctgagggagtcattcagggaacgttttagtgtcaagccattaaatcacacctcaaaaggttggaagtggcccacatatgagtccatataggtgggtctggaaaggtggggcgagcaggaatctctttccattatgatgatggggtttctaaagtaattattgctttaaaaaaaatctgcctctgccattttccagtcacactgttcttggagcgagatgcatcatcaatacttttcatactaaacgttctctcctattggatttacctggattctaggggtatttttttcacatttctctggagacaagtagtgctgataaagattttataaggtctctcttgctctcaagctcgttttccttaacttttcttgtcccagttaccagtttatttggtccccagaaaccttctaatcttcatctttaatgataaatttatcttttgtagttctcctgtcaaagcttttgtgtctagtggctcattttgcttaattgctggagttttctctggccttttgttatttggtcctgcgtattttcaaagattctgtagaattttcagactgttactctgatgtttacttggtagattgattgctaagttgcattgtcttcagaggaggtttttgaggttgtgtctattataatgtctgcttctacccggagtccattgcacttggagtgcttcttgaagcccctgagcttatgctgtgataaaagcgtgaatgttttactgtgtcaaagcactgtggctcataaggcttcataagctctggcttttatatcagagcatctcatatggttgtgcagattgcatcctggtcaagcatgccaggatgaggggccaagggtgtactgaatgccagcctgtgcttcatttgccaagccttgcatctgatgtaggactgtatcctcacaggggacaccttttcctaatacacacaaaggtatcatgtgggctagcagctgttctgctataacttagctaggtgtctttacaggagaaggtagtggaagaggtggtggtatttctcctcgggaactgagattagcttactcgacgggaatcttgaagtgtcccaagatgaagccattggtgccccactcccccaacagttgtttaaaagttattaaagaaccaattgacatttgctagcattttaaatgctcaggatgacttatgaggctatgtcagttattctttactcagtaggggacttggagctacaggtctgatttcagcctctgtgcagcccccgggccacccttcctgctgaatctaagccccactctctctagaggattatcttggggtttattttggctcctggctttgaatctgaattgctgcccctcaagttatattcaaacaactctattaagataacgttgtctccaggggctccaaccagccagtttcattttccaactagtttggttggtcagtgcccataacaggtccacttgaaattagagctgcgtttttttttttcttttctttttttctttttattattttactttaagttccagaatacacatgcaggacatgcaggtttgctacataggtatatgtgtgccattatgatttgctgcacctatcaacccatcacctaggttttaagccccacatgcattagctaattgtcctgattagagctgcattttctagaagtcaacaacatagtgtcttgaaagccttctttgtcatattgcagttgtgtctgagacctttatgtaccttagtttttttgggttttccttccccatgtgaaccacagttaccctttctctgactagtatgctgaagttatagtacatttctatttagcaggtgtttcctgtggttgccttttgttctaaatctatgattgaaccttatctatattgaaccaagtctaatatctatttgcctggacacctgtactaacataatatgattctttttgtatccacccttatattaatctggtaggatttccataacaaaatactgcaggctgggtggcataaacaacagaaatatatttcttacagttctggaagctggaaatctccaatcaaggtgttcgcatgtttgctttctcctgaggcctctctccttggcttgcagacaacttccttctctatgtgtcctcacatggacatggacttttctctgtgcatatattcctactgtctcttcctcttatttatttttttgagatagggtctcgctctgttgcccaggctggagtccaatggcatgatctcagctcactgcaacctctgcctcccaggttcaagcaattctcctgtctcagcctcccaagtagctggggttacaggcacctgtcaccacacctggctaatttttgtatttttagtagagacaggatctccaactcctgacctcaagtgatccacctgccttagcttcccagaatgctgggattacaggcatgagccattgcacccggcctctcttcctcttcttatggggacactggtccattggattagggccccatgcttatgacctcacttactcttaattacttctttaaagtccctatctccgaaggatatgaacagacacttctcaaaagaagacatttatgcagccaaaagacacatgaaaaaatgctcatcatcactggccatcagagaaatgcaaattgaaaccacaatgagataccatctcacaccagttagaatggcaatcattaaaaagtcaggaaacaacaggtgctggagaggatgtggagaaataggaatacttttacactgttggtgggactgtaaactagttcaaccattgtggaagtcagtgtggcgattcctcagggatctagaactagaaacaccatttgacccagccatcccattactgggtatatacccaaaggattataaaacatgcttctataaagacacgtgcacatgtatgtttattgaggcactattcacaatagcaaagacttggacccaagtcaaatgtccaacaatgatagactggattaagaaactgtggcacatatacaccatggaatactatgcagccataaaaatgatgagttcatgtcctttgtagggacatggatgaagctggaaaccatcatcctcagcaaactatcacaaggacaaaataccaaacaccgcatgttctcgctcataggtgggaattgaacaatgagaacacatggacacaggaaggggaacatcacacaccggggcctgttgtggggtggggggagcggggagggatagcattaggagatatacctaatgttaaatgatgagttaatgggtgcagcacaccaacatggcacatgtatacatatgtaacaaacctgcacattgtgcacatgtaccctaaaacttaaagtataataaagaataaaaataaaataaaataaagtccccatctccaacatagtcatactgggaattaatgctgcaacatatgaattttggggggcataattcagttcataacaattttcacttgccagactttcttatttaagcatatccagtagatattagaacaaaaacaacgtttaatttataccttttctgtccatttgggctcatggagctatgttaaagacttcatttccatcctcagaaaaacattccatttagcaataattatactttggatcttgccccttagacagcttcctaattgttatttccaaaaatctaagcctcatttttggaaactgctcccctatgttaagtatagtgaaacgcttccagacaatctcattttgttaaaattaaattggtgttttctggaccatgtttgtcccataagcagcattctcaaagggctcggcaggctggggcccccagcctgtgcttgtagacatcatgttgatttttaatcaaaagccttattttggcagcttccgtttttttgattgtttgaaaaatacttcctgatggcttggagtttagattctcagttgttggatcctgaagaggagtttgaagccttagtttttcaggaaaaagcacctgacctgtgtatcttaagctgctaaatatttaggaagcatcagggcttatttccacttctaccacacaatattgaagcaattcaacaattgaatttttttttccccgctagaaaagagggtttttcaggccactttgaaattcaggtggttgatttaaaaatgcaaattctttgggaattaatcatgaaatgtttcaggatttttataaggaagctcatccgctcagtgaaataagggatgctttcttggtcatgaattttctttttgtactattttgttagttacttggtgggctagacagtatttttgggtgccactggcaagtctaaaacacaggaagggagaaagaaaacagctgacacttacaaagtctgacccgttctgtgctggaaacatttggtaaatggttaaatttactgcatatgcttgaaacgaatagctgaattaataaatgaatgactttattaattcaagctgttctatttttcaaataatccgaattagggatagtggcagagaccatgtatgctatgtgatcattttcctcctgggcacataatgggaactgtgcaactcactctcaagtgttgttgggtagggccatggggttggattctggccaatgggatctgttaggaatgacatgtggtacttcaaaacctaaaaatcctcctgcatgatcctctgcattttctgacttcctttatctactgactggagggtgctaggagatggtggaggcataagacagaagtatgctgtgtcctcgaaacacaacatggagcagagcccctatcaatgcacatgaagccacaatgtgattgagcaagaaataaacctttattgttttaagtcaaggaaatttgattgtgggttgtttgttacagtagcttgtgttaatttttaaaagtttcatgatggtgtagtttcttagtatcattatgctgaaaaatatttgacctgaaagcaacaaatactgcaatcaaagtacctatgccagtttctgttctattaaaaacaaattcccttgctctatttattccaactaaaatcacagagatgtgctaatttacaggccagcagagtgcttgtcacatgcacattaaaatggtgaacatgcaatcttttagggaggtgaatagtggcaggtgtctattcttcctctaaatcctgcccaggagactgccttgcctgggcataacccagcagatgaagtcatctacctctcctggccaccatcatctgattaagggaattcagactacatgctttagatggtgaacatctcacaaaagggatatgttatcagagataaagtgtatgaattccacgtatgaccactgcatcatttgtgaatgcttaccgtatatgactgtatgaatgggccacctgcatctcagaatgtttttggaaaaagggattaaatataattgaaagaaacccaagaaagagcaaaaagcaaaggctataaggaatgagtctataaggttttattttttttcttcccctttgagaggtagtcaattcataacctagattcctccctagccgcacagcccaatatggcagccactactcatatgtgactatttaaatttaagtttaagttaaaattaaataaaaaatttattttctcagtcacactagccacatttcaagaatacaacagccacatgagttagtggttgccatactggacagcacagatgtagaacatttctgaaagctctctcagtgctgacctagagctagctttggtattttcatcttttcatgatgcaatacaattgccaaatttcttacttctcatatactcaaagcaacctcttgaaaaaaaattttttttttgagatggagtctcacctcttgaaatgtttttaagattgttacagtataaattctggaaaaggttctagaacaaattacaaaagattgatttctgagtacacattaagggaagctgtgataattagaagccaccaagcattcactaaaattaagttactacacatttacttcagtgactggaataaaaatctaagcttcaatgaaagaaaggaattatttgtttttattgccaaatatttgcagttcttgcacacagtaggtactcaacaaataacttttgaatgactattagagaaataaaattgatatagtcagtttcagttttcatcaagttaaattagaaaagtccttatgctgtcattgaagaaatggttactgggtcgtagggcagttgggtgagttgccaatgagttaaccagtcatgagaagtagctgacgaagagagcatgagacttgaaattagatagggacctaccttcaattcttggctttcacttaacctgtgtaatcccaggcagccatttcacttttctgaatcactgtttcttcatcctcaaattgggcataatagggtgctcatatcaaatatggtgatattaaaagctagcatgaacatagcctggaaggtttctagtagaatgttgtggagtggttcttcacatttagctagccagtgcttctgtctctgacttcagtaaggatatactgattaaatttgtggatgacccaagatggagtaagaatcagaattcagagggaccttagtagacaaaaagataagctgaatacaatccttaaaagtttcatatgggtaaataataattaagaaaactgcaacagtaattgacagaggacatgtagtttaacctcattgtgcaacagacttgtggattaaaaaataatgtcattcactgtgtgatgtggctgccagaatttagattttagcaataggaataaggtatgcagagtagcacatcagaacgcctaggaagttaaaaatgccaatggctgggttattgccagagattaattaattgatgtgggatgcagctttggcattgggatatttcatgcccctcccctgccccgggtgatcctaatttgagaaccactggtttaggctgagggaggtcttgacgatttctgttcgctccacttttacgtagtctattaagttacttgcatggaaaaatgcatgctgcatgtagttccgaatgccccacccaaatcttggagcgtatcaggaagagtgtggggacagtgagtggatggcaattataagagacatgttgaagaaaacaaaaagtttgtcctgaagaagagtaggaagaggtaaccgccttgaacattgcctgcttggtctattttaggaagctgggttcagttcttctctctggtattccagaggatagaaagcagtccactgggtggcagcttcaggagatggatgtagggaagcatttgcttactacagtgctttctagagatggtgggcttgccaggcgctggagatttacaaagacctcacagattttgttgagaatttaaagggacttaaatgtttattggcagattcaacttccagaaggtttcttttcatccctctcctcatctcttactcttttgctttcatccactgccttggccacactggtctcatagatgttatttaagccccgccatgcaccatctcagggtctttgcacttgctgttcttcttggttgaaatacttcacctccagatatctggacaatttcctctcatgtttttgctcagattacaacctttccctggactccttgtccttctttctttttagtgtttctctatccccatctctcttacacacacacgcacagacacagactcacacacacaaatacgcatatatgtgtatgttttcctctaacaaaatataagccccacaagggccaggacttttgtcggatgtgtttgccaatgtatccccagggcaagtatagtgccaggctttcagaaatgctcaagcaataatttgttgttgaatagatctctgggatcttctggttccttggaatttcaccagtggtagcttgaatttcctattcaggcctggacaaacatcctgtaaagaatgccacctaatttgtatctttgaaggatgaatccaataatatgtgggtacagtgaccactttcaagcttttcttctttcttcttttctccccctgcatcaaacaggaacagcatcttctaaaaacaaaactttattcattggtcagcagtttcatgcaaccattgagtgaaatccaatgtggaaaggaaatccaaaactttactgcagtgtaatttgtttcttctgtgttgctttgtgtacagtaaaggtcaataatgcacaggaaagctaggtttaatttctttgatgtgtaaaaattagtgctttgtcatcagttacagtggcaggaggacaaatcactggcacataaagttgttcctgctacataaattacaaatcttgttcggaaaaaaaatactcacatcatcccttgttattttaaaaatgccaacactgataaacagtcagccttggacatgtattaaaatcttcaaattgtactaaaataaatttagccttttaagataacacctcattttaatttcatacatgattaaatccatcaattcaaaggtcttttaagatgtaagttttgaaatcataatagtaccctctaactccctgcgaaaaacttaaacctctttctacttcattaataatgttcttgacagacaaaatttttaaagaaaatcctcagctttgttttgtgtttttgtgtgtttttcttgagaagaggaaattaaattatgatcataaatccctttcatttttagaactagatttttcttttaatcataatccagaggaagtggaaaaagctttgtgaatcaagttttgtatttctaacatgatgacatagtctaaattattgtccaatattcagcaaaatctttatttctatatgtggcagaactgaatattttagtctcagcataaatagtgcctcctcttccctatccaggttgatgactgcttccttgtgactttgcaaacacaacttcttcttattattattatttcaataggatttgggagaaccagtggtgtttggttacatgaatatcttctttagtagtgatttctgagattttagtgcacccatcacccaagcagtgaacactgtacccaatgtgtagtcttttatccctcatccccatcccaccctttctcctgagtccccaaagtccattgtatcattcttacgcctttgcgtcctcatagcttagctcccacgtatgagagagaacatacgatgtttggttttccattcctgaattacttcacttagaatagtagtctccagttctatcctggttgctgtgaatgccattatgttattcctttttatggctgagtagtattctatggtatatatataccacattttctttatcagcttgttggcggatggacatttgggttggttttatattttggcaattgcaaattacgctgctataaacatgcgtgtgcaattttttttttgtataataacttcttttcctctaggtagatacccaggagtggaattgctggatcaaatgatagttctacttttagttctttaaggaatctccacactgttttccatagttgttgtactagtttacattcccaccaagagtgtaaaagtgttcccttttcaccacatccatgccaatatttattattttttgatttttttgattatggccattctgcaaacccaactttgaatagactatcaaaggttggggctggatatggatctgattactcaccctggccccggaggccaccttcaggcagagcagtcctgcagcctttccagaggaggcagcctcctgcccatgtcaaagaccttggaggctagagtatttgcccttctgctctaatcaagatctccttggaaagaaagctcaatcagcaaatctttattgagtaccttccatcagatagattctccagccccaagctggtatggtgaggataactatatctactgtaaaatacctgacctaaagaaacaatgcaacatgtgcatatacaattttaaaagaaaagctgttcaccattttctaaaggaaaaattatatctataatgtatgtattcacatgtttatttttatatatcaacatttatctgctttttctttccatgcctcccctctttccgtcctttcttttcctcctggatacatccattcctgcagcttaattcttattagctaagggttatattgcagatgtatgaattaagagcaaaggctttagaatctggcagatctatgtttgaatcccagctctgccacttcacaaaaagattgttctatttgttattgttactggcacttttattgccatcatttgtagtatagacaataattacttgtgctatttatgtttattagttatttaccatatcaggcactaagggatttgcatgtattttgaatttaatccttgtaacaattatatagtgtaggtagtattatccccattttatggctaaggaaactgccttgagattttaagtaatatgttgcccaaggtcacataataagtatgtaaaggaactgaaactagctttgtgttttgaacctacggagattctctttatcctctgtaaaatggagatactgattcctgccatggtagctagttgggatgattcaatgatatgggatatttcgcatttgcagtttggttccctgcatataacatatgctcacacaggatatggctgttcctgctctgcttctgctacctccttcaaggttgaataatctttctttcttctctcttagctatttcccagcccctcacttaagtttataactatattcttttcatcaacctagaaaaccaaatgaagcctgaagtattgagaactcaggaaatgtttttgaggtcccatgtgattcagtggcaaaggcagagcaggtgcagatgcaaacctctgggctcttagatgtgaaccctctgcctggtgttttatcctagcttgtctctgcagcaaagcaggtgctggagtctgagggggtccttgaggccagcttcccctgggcacagaaatgtgctctccctagaaccatcacatggcgattttcctggcgatcaggggccctaaatggtgaaagggttttggccatacatcactaaaagtgtgttagtaagaggcatgaggccccttgggactggatgtggtggatgtgtcatatcacatatgaagtggcatgatttgatagtgtgccattttctgtctgtaactaaatcaaattctgtggttgaaaaggactcatacataatcttggtgtcctttaacgcagtcatagttcttgtgttaaataagttaggattggagagttgcatttctagacccgaggggagcggttctggatcttgctctggtttcctgagttgctgcagcacccaaccctgagcaattcctgtgactcgtggtggttgttatagagagggtacacagtggtgaatgagaaggaggcttattattgttatctgtaggcaccacttttgcttgaaaatgtgtaatggcaaactcaaaagtagaaatacttattccctattaattgtcttttttgtcataactttttaaaattttttgggttctttgattcaaatttcacaagatctcacctaatatgctggtaaatttcaccagaagtatgaagacagaataaactttcttgaatttttttccctgcaatgtaacagtctgcttctagatgacttcttgaagaattatctacctaatttgtattttttaggagacatcagagacagaaaaaaattcacattaaggaagatatgtgtattatataagtaaatcctctttgcttacagttcttttttaaaacaagcattttatacaaagtaaaataactttagcagtttggttcatttttaaaatatttcatgcctgcatgcatgattaattgagacaatcattccatttaactaatatttgagggcatactatatgccaggaaatggggctactcaggccttcacagatcttgtaatctatcaaccaatacaaacaaataatcaggccattataatttagaggacagtgttttgagggcacatggcaggatgatctaatgctgacttggtggaggacgcaatgacttcctcctgaatgaagtagggtttaagccaggtcctgaaggagagtgagtgttaacctggtggagctgttggggcaggctaggggctttggactagggaatagctcatgtaaatgcctggagtgggcagccagccatggtgttattgtgttcttcttcttctcagagatatttacatgggcaagaacttcagattatacttgattgtgacatttgcactttcaaaaaacattgcaaaactgcctggtgaaaaccatcccagtcttgacaggtgcatagtctgatatttccaaaggtaacagttgtcacataggtggtcctgccctgttgagacacaagcccgttaagcagtttattttcaccccatggccagattggctttggagcaatcaatgcagcctggtgcagcctggagaagagatcctactggataaggtgggaagcctttgtaaatcaaaggttctaagactgctcctactgggaagatagaagtgatgggtggaatggatggataagtataaagaaattctttggttctagaaccctcaatgtaaaaaacattagaggcacacaggtcataatcatgtcgcataatttgattaatttcctaagaaaccttaatactacaaagtcatattgcatcataaacttacgttttatggagcaaagagccctgggcttgggaagggtccacagggtctgggttctagttccaaccacatgccctggggtcaattatttaataacctataatgaagctgtcgtattctatcaccacgacatggatctggttgtgccaaggtagacatttgagattacataccgtaaaataccgtggaaaataactgtggctctcaccagctctagcctctttctgggcttcatagctccccttccccagtgctccctgagaatgtatcattcagaccatcttctgtccttcattcatagtcatagtcccatgcctcagtgattcaacaatcaggctctcttaccctatttttgcttacccttcttttttctttcatttcagatgttcagtaactgaaaacaaaaaaggtttaagtatgataatgaatttttttccacactcaagaatataaacattgaaaagattggcctctttatgctccctacaatgagtgacaggttctgacttaattcaacttaactgtagagattattggcataagagttattaatataaaagtcatgactcaaaaaatatctccactattaaatatcccctgcaaaactttattatccaggtcttggcgtgagctttgattgtgttgaaagaatgaacttgtgtttttggccctgtaatgtgaatgatggacaggagagtgatttttctgttactgggtggtcatcctcttgaacaagaggattctgaaagtttctttttatatatttgtgtatgtattatttttccttttccatttttgattgtagtgaaagttctatctctaagcattaaaaattaaacatttaaaatgtgcttttgcaatggggaaaggactccctatttaataaatagtgctgggataactggctagccataagcagaatagtgaagctggaccccttccttagaaaaatcaactcaagatggattaaagacttatatgcaaaacctaaaactgtaaaagccttggaagataacctaggaaataccattctggacataggacctggcaaagatttcatgatgaagatgccaaaaacaattgcaataaaaacaaaaattgacaaatgggacctaattaaactgaagagcttctgcacagcaaaagaaactatcaacagagtaaagagacaatctacagaatgggagataatatttacaaaccaggcatctgacaaagatctaatattcagtatgtataaggaattttaaaaatttacaagcaatgcttaatgacgagttaatgggtacagcacaccagcatggcacatgtatacatatgtaactaacctgcacattgtgcacatgtaccctaaaacttaaagtataataataaaaaaacaaaaacaaacaaacaaaaaaataatttacaagcaaaaagcaaacagcccctctagaaagtgagcaaaggacatgaacagacagttttcaaaggaagacatgcaaacagctgacaagggatatgaaaaaatgctcaatatcattaatcattagagaatgccaatcaaaaccacaatgagataccatcttgtaccagtcacaatggctattactaaaaagccaaaaaactcagatgctggcaaggttgtggagaaaagggaacacttatacattgtttgtgggagggtaaattagttcagccattgtggaaagcagtggtgattcctcaaagaacttaaaacagaattaccatttgccctaggaatcccattgtatacccaaagaaatataaatcattctaccataaagacacatccatgcatatgtttactgtatcactattcaaaataacaaagacatgggatccacctaaatgcccattgatggtagggtggataaagaaatgtggtacatatacaccatggaatactatgcagccataaaaaagaacaagatcatgtcctttgcagcaacatggatggatctgtaagccattatcctaagaaagcgaactaatgaagaaacaaaaacccgaatactgtatgttctctcttataagtgggagctaaacagtgagaacacataaacgcgaacacaaagagaagaacaacagatactggggcttatttcagagtggaaggtgggaggagagagaggatcgaaaaactacctatcaggtgccattactgtgcttattacctggatgatgaaataatctgtacaccaaaaccctgtgacacacagtttacctatataccaaacctgcacatgtacccctgaacttaaaataaaagttaaaagaaaaaataaaatgtgcttttagaagtatccagaccaggccagagcttgtataaatccatattactatcttgcagttggtcaaagtagttaagaacctgtgtaatagtgttttctgggatgttgcaacaactttctatctttattgcaagggctttctgtcttcctattatactaattaattctttcagtctttcctgattattgatgccatgatgattttttttttaagaatttgatcctgcaaacttttatgcctaaaatctctctagctttactattgcctccagcaggaatttttcacctaagttcatcaattgcagtcaggaaactggtaaactctgagtctttctgcaaacttctgtgtgtagaggatccagagtttgagtcagaccctgaaagctatccttgatcagatttagaatatcctaactctttagtaagaaataaacccgtctagctttacatgcagccaccagccgtgacgtgagactcaccccacactgacctattattcaacatttcctgatgcttccatacttctctgcctttgaacctgatgatcattctacttataatgtcctttcctcatccttagctttgcctgttgaaaccttcaagattttactccagagccaccttgtctggagagattttatttactttgtgaggaacaaaatgctgctcttttatcttttctcctcctttataacactcatcacctctccccactaagtttgtggacaaggaatgtattctgtttatctatgcattcccagcccagaggaaggtactggcccagagtaaatgctcattaaatattgtgaataaatgggcaaaaggatagaagacacattctttacttagatggagttgagataaacttagagagttagtgctagaatcaacattgccttcttgcaggcaaatgatttacataatctggacatcaagttgcctgtcccctggatgaggtatctcagtctcctatgttaaataatagtaaattgattctttcttcaacacagagtataacaaatacctctaagtattctaagttttatgaaacaaaagatttctggtgctggagattgattttggtagttataagcttctcaggatatctccaaagagacaaggggcctaggtggatagaaatatttcccttaaatcagcctgataaaaagttctccatggtaaggtagcctttgtcttgtattaaaacgcagttttctcaccaagtgactttggcaggttggtgaatcctttaagaaaaagagatctggtctggagttgtggtcccccggagatttagttgctattgtgatcatctgatgacagcagaaaacccagggggatcagcatggtttatttcagactgcagggatgtcagcctgttattataggagtgggagctacctaggcagatggatgcttcctgatttgtggattgggaacacgaattgagcagcagccaatgcagtgacacttgtaatactcttctgaagccctccttttttttttctgtccactgagaaacagtacccacctgctaatctacaaggcaaagccatccttatttcaaagtgtatttgatgcaacaaaattctttatgctgaaaggctttaaaaggcctctaaatttctagaaatgagatttaatctgatatttgaatcttatgccttatatccaaagaacagtctctccctagtccccatttctatatatagatgcagaaatttcataattggaaacctgtgactttagcttatggcttggtcccttgtgaagaatgtattgtgctttttaagtgatgtgtgtatttgtctgaattagtctatcagaagtttctttttgagaatagccattaatgaagatgagaaacagagctgtgagggacatgaggaggaaaacaaacccattaaagagaggaaagaactccctgccccaaccccaccaacccaatagcatttaaggccaccaaagggaacgttttctgtgttactgtttattcaggagctggcttctaacctgccatatgcttcactctatttagagagcctaggtaatgttctctcattttgtaaggagataatattacttaacctaagagcttgtgcaaaactgggggaaatagttggctaataagttacatgcatccatgagttgcacaatagagatgaaatgatgacaaattgggatgagaggcaatgagtgttgtatgggaactacaggatttaagatttgaaaagaggcattttaagagcccatttttttgctttttctactcagcttaggaccccaattattacttactagcctcatttcactggacttcacccattcacacacctgtcacccaaaatactaccaaatattttctttaatgttatttttgcatttaatcctcatgaaggttaataaagtcttctctctctatgtggtatgaaagcataactgatgactttattggtgcagatatattatggctgcttttgacgtttatgttttccgtccagatagatgaatgattccagtgaaagtaaatcaattgcacccagactgtgggtataaaacaccacgctcagggttttccttcttgtctggcagatagtagagggtgtgaaatattgaaatttgacttaatgctgtatgtttcttctgaaaaagagaatttcctttgactatctcctaaggtacatctgtgattgatatttgccctgtcatttagtgccaatccagggaggggatgccccttttgtggggcctgtttgctctccaagggagccttcatggcttccttcggtctagttggagtaacctgttttttcttctagaggattgaattcaattaacagggattacaaattcagttattaggaatttatcagtgatggcaaatggaattttactggtgtattagtccattcttgcattgctatcaagaaatgcctgagagtgggaaatttataaagaaaagaggtttaattggctcactattctgcaggccgtacgggaagcagagtggcttgtggttctgaggaggcctcaggaaacttcaaatcatgttggaaggcaaagggggaacaggcatcttacatcgcaggagcaggaggaagagagagagttgggggtggggtgccacacctttaaacaaccagatctcacgagagaactcactcactatcacaagaacagaaccaaggggatggtactaaactattcagggaggatccatcccgcctacacacacccatttccaatcacctcctcacctccaacattggggattacaattcgacatgagatttaggtggggacactgattgaaactttatcaactggattcccaacaactggaaacatgagagagtaatttcagtttctaggatgggtttaactggctttcatgataaaaagagaaatatttcttgatccacaagaataaaggtttttgttgttgttgctgctgttttttccaaaagtgatttgagttcctagtgtaaatcaaaaccagacgcaactgtaattgccaattgatggtacaaatggacaggtaaatccaagaagtgtatttcaatttttaaaaagttctgtaccctggaattcccttcttcagcttgccttccacctctgcattcaggagtgctatggccctgatcaatcaaaatgaacactggctgtaaacaaccagcatggtggtggtgctatgcctgaatgtcagccttttctggtcctttgagcaagaattaattgcattctcattaggggtcctgggaacttcagggtcaatctttcttgtggaattgagcacattgttttaaagctatttgtttatttgtccagttcaatttccttctagacagtgaagcacttgagggcagggactgtatttatctacctttgtatctttatcaccaacttggtgcctagcacagagacagttctcagtaaatctttgcaaaataaattaaaattgtagaggatatttagaatttttattctaagataaatgcaaatgtgttattgtgtcaagcactcatctgtatttaaatcccaattactggaatgtattttaacaatagtttagtctgtaccctaacattgactgtgcgaatttctgacttatagtttaaaagtctctagggaagaaaatttcaaaacttcctcgttgctctttttagaagttcaattacagtaataatcagcacctactaactcactgggatatttctagtattatttgctctcatgtgaccatatagcatgtatctcaagtgctgcacaagatttgcagctgtgactgtatggaaagcttgggaaatattgtgctgagctccttttgtaagggatgtggtttctagattctgtgttcagggaaaaaaaagtctaaaacctgcaagtactcatttgtggaacatttaatttcattactttgttagcaaagcgtgtatctggaggtaaacaccaatcagctacagttggcttcaggcccaagagaattgaggttaggagtcaagacagaaagatggctattgcaggaaaatacgtctgctctagactaggataaattttcctattgaaatatgaaatagaccattacacagaagtttgcctaccactaaaagtgttctagaacattatagttcaagggtgccaaattttaagcaaagtcctgtggtttcagtgatgctattttcaaatcatgattcctgtaagaacaatctctgccactaaagtgtagctttctctcacacacttattcatatattctggctgtcctctgtcttccactaatctgagaagtttatggcacaaatctgattcttttccttaaatacttgcattaggttaattcttaggtggcccagtaaccttgcgaagaaagatcagtttggggcaaaccatgtgaagccccctttcaaattcatttctgccctactttctgtctgctttaatccaccacatttccttgtctattttgtactctaggtcaaaccacagcagcacattttaaaacctggtaggaagcgggtctcagagctctagaggaactattatgccagtcttacaaattattttttaattatcggtttctcagacaactcacttggtttactttcaggaaaaatgttatcgctgtaaatgagttgtactttcttctgtcagaaaacataaagtgtgtaaccccttttattttagctgagtgtgaatttttagattcaaattgtttgccatgtatttcttagtttgtaaatttgaaatgaagcaacataaacaacggtttctgcccggagaaggtcatgccagtcaggaccctgcgcattgatggtcatcttcaggtgattaacgttgatagatatctgagcagagaatagtgcaggatggagaaggagccacccacagacagggtttagcacattcagagtagactcaccaggctaatgctcatgggcccgctctggtttcatttagggctgagagactgattatatgaatggacaatggccagaccctatatgaaaacagaaccctgacccacaacctgcagcaacccgcccaggaaactgactccttattctcaataaagaacccagaaagctagcctgccatgagttagacttgtaacaagtcagattgcaatctccagtaaccatctaggaagctaaacaataacttcaacaattgacctcaagtggccaggacttgatcaataactggcagcttccctaattttgtgtccccatttttaacttaggatgaacgagagacagccaaataacacacccctaacaaatcagacaggatgccccacttcctgttagaccacctacagcttccctgcacccataacctttaattagggcacatctgaaaccttcctttttttcaggataaagctttcccacttctcttcctgcctttgtgtctccgccaaaatgcaagtgacagtgtggctgactccctgcctctagcaagctcagaataaatagcctttgcttgttctcatttggttggtctttgtttatttccagagggcctagttgggcaagaaatgatattgtccaggagcacgttttaatttcatggtctctgtaggtaggtgattccatgtagctgttgttccttcaggtacattagcatttcctagctttggggtgggggctgtggctgacctgtgagagatgcagccttgctcccacttgctgttccacgtgtggaaagggcagagcagtaaagcacattgctaaatgtcaacgcatgcattaggtattaccatctcacggtgaaccccattcacatggcgcccagtagggaggagcagaggggcctctttgcaacagagatcaatggccaacagcttttctttttttaaaatgtaaaactataaaggaaaaccttttcaaacattatcctcaaaagatttggaaataggagatctgagattagtgggtcactgaagggctagcacttgcttatagatgacttagcttagaaactccaacttcctcatacttttgtttctgctgataatagaatgcagtacaacaggagtgaaaaacaaagccaaattatttctttatctttttctaatgaaaattcaatgacatttcagcagtgacttcttcccaaaccttaaggagtacatataagcgttaagatgagaagttgaccaattgcctaagaacagtttgaagcatatcacaccttattttgttattatatttggtttctactacgtagagttcattatctgtgttctctctgttattactatatttgagaattgtaattatggagctttaataggatgaaagaaaagaaggatgcaaaaatacttaaatactgttcatgatgaaagatctacattattttcaaattatcttttattttattagctgagtttttagggtcctatggcaatatactagagtccaagtattttttcaaagtaatttaattttatgttgttatgattaggtaagtctactgaattgaatcaatttataggaaaagtatgagattagtattattaaatttcatactgtagtctggtttgctttaatatacctatatatgtatgtgtgtgtttatttaagactttagttgtgaaatatagactcctgttagtaactgatgccttttccttttctctttgattagaagaaatacattagaaaggtatcagaatcaactcatttgccagttggcaaacattcctggaattttaagaattgtaacaacaataaaacaataactgtttattaagtgcttactatgtgcactgtccttagtgctttacttctgttattttaagtgttagattatttatagagatcacagtaataatcctttcattgtttatgcacgcacatttgcaatgtaaatttgctgtctgccccacctccttctgtgagggaagtctattttccccttctctgaatctggtctggccctttgactttctatggtgaataaactgtggtgaaggtgatattttgcaagacaaggccttgggagacactgctgctttctctctcagcttcttggaacccagagctgggatgaatgaccatggagggaagaggctcagccacagaactagcacaaccccttgatatgcaagcgaggccatcttgaacaagccaggtccagctgagctaacagatggctacaggcaagacccaaaccaaatggtaccccacagaattataaaccaagcaaatgtttgttttttaaaatttttttttattattttatcgttaattgtagtaaaatacacagaacataaaatttaccatgttaactatttttaagcgtacaattcagcagtattaagtatattcacattgttgtacgattaatctccaaaacgttttcatcttgtagaactgaaactctatacccagtaaacaacaacttctgtttctccctcctgccattccctcacaattaccattttactttctgtttctgtgagcttgactattctagatacctcctcatacaagtgaaatcatgctatatctttatgtgactggcttatttcattaaggataatgtccctcaagttttatccatgttgtagcatatatcagaatatccacctttgtgaggctgaataatatccactataggtatatgtcacttttttttcatccattcatctgtcagtggacacttgtgttgcctttatccaaatggctgttgtaaataatgctgctaaaaacatgggtgtgcagatatctctttgagaccctgctttagattcttgtggatattcccagaagtggaattgccagattatatggtaattctattttttaactttttgaagtgttgttgttttaagccattcataactgaggtgatttgttctgtgtgatagctgaaacacctaactgaattttgacaacaaggcttcgaggtagtttctaccattctcatttttcaagggagaaacttcacttacccaaggtcgtatggtttggacaaacagaaccaggctttgataccatgaagtctggtaccagaacctcactctgcggcacactgtaccactttacagaaagcatgttcagaattgttttacctatagtggttgacgctggacagaaagaaacatcagtaaccaacaatattgaaaagatccctatctatgactgatgtagttcaaggaagtatacttttccagagtttgtagtatttatccattgtatggtggcctctgagcttatttctgtgttgtcagctaggcttaccctggtggtgttggagggaatagtactggatgatctacagggaggtccactcaccccactccagggctgctgggtccagatgggcaaattgggttcgaacaaagggccttgccagagtgggctggaatccagagcccatctggattccactcaggtgggaccaagcctgtgctctggccatctgggagtaaggggtcctttttctaatggatcctccccggaaaggctcctttgtgcaattcatctgaccggagaaggtcctctccttaagtccttcctcttccctcagatagcggggctgttgttgaactgtatcacagctccctgtcctccccatcaccaagtccctgccccttagtgctggatgactgttgtttctcctccatcagggtaacctgtgttgttgaagaagccaccagaaaaaactgtggttgagcaataatgaactcttgacttgagcgttaaagcggggccccagtggtttgcaggagccggtcaagtagagatagaccgagatggagatgagccactgtcagctgagtgtgtaatccaggaggctgtctttacacagtcctgggctttgaagttggagcaactcctggctttaccacctaggaaccatgtgactttggacactgtacttaacctcatcaagtctctgagacacaggtacatgagaaatgcctgccttacaggactgctataggctcaaaaaacaaagtctctaaagggactggaagagaatctattaaatagtcaatgttcgatacatgttcattgttaccacacccattcttcctcattacttccttcacctcctcccaaattcttctacagtaataataatattactattacaactattatcattaaaaccagaggccagtttagttagatttggtggtatctgatatgattcacattaagagagttataatgaagacctgcttgtgattgcaaaggttcacttgcaaagggataggatgaatgggatgtggattagcagcagcattataaaaaactttacaagtttcagttgagaataatctaacatgcttcgacctaaagaagcatacaagtaagcccaaaaacaaggagtagggaagggcatccaccaaccacaaggccaagggaaggcctaggtatctctacaggacagtgaagaattgtgacctatagtttaatccaccacaaagggcatgcactggtatggttggacagtttttaaagcatttatccatcctaaatgggcagtcccaatgcttgattagtagtgccagtgtaatgcctattgttaagtattttgagtagcatcctcattgctaagaacttcatctacagtatatcatttactctttttctttctgcattagtctttatattagatacttatctatgtatttatgtttatttaaataaacttaggggtacaagtgcaattttgttacatggatatattacagtagtggtgaagtctgggaggaaataccatttacttttaacaacaaccatatactttttgtatatataaagcacagatacatgtgcagtatacaaacagatacacagtatatctgtgatattaaaattttatgtgggggagcaattagaaaaaatgtctaaaaagtgtccttagagggacgataatgaaaacatttaagaattactggcaattgatatttttattaaataaatgtgaaaatataggttgagaggttaaataattagtccaagaacataaaattattaggtgtgagagctctgacttatacccaggtttgtgcgataatgaagtgtgtgcttttatccaccttaccaccttgcttccttgcccttcattcagctctctgaacctctgcttccctccatgtgctttactgcttcccatcctcccagatttctctgtaccctcccccggtagtggcctagattctcctaaactgctctgtcccccttctaggatctgagatcccacctctttggtttcattgttagtgaaggaatgcttcaagggaaatttctgctcttgggttggaggaatgagtgtttgcattttaatgcccattcagagacatttctcaaaggactgagtcttttccagtgggacttcaggatctctcacatgccagtgggaagcaatttggaactgtgtgctttgcaaacccgtgcaaatcatagcaggaaggccgatgcctatctctagctaaagccttatgtgctatatatcttcatgtgaatgtctggacaagaatcccctgctcttatgccataacctgggctctacacctgaatttctccatgtagcaattccaagaaaattcaatcttcaaaacacattttttagtaaatagaggcagccatgagaaacattttgttgttgctctgaaaagttgttgttttataaaatggaatagtcaatctcagctttctaaacagagtttctaggatcaatttatcaggaatgagtggattcctttctcttcctcccaaagggtctatggaagatgaagaatacaagcaataatagcaaatcaatcaaatttacattgcaaagagtccttcacaaaagtacctgagagggctctacctagataatcagatgctaacattacctttttcccaaatatagtccacctctgcaaagaaccaaggagtgtgggcttcagcttctctacagagtcgctggtggttaaactcaaagtagcagggcctcacatttgggcactgctgtgtaggaggtgccaagagtcagtcactcagctgatggcctctggtttccaaaggaaaaacaaaaactgttcagagctattgttcaaaaaggaaaaaaggattactccccaaattttagcacccaaaagcatacatgtgagtgtcaagtgctaacatttgcccaagtcaggtctggtggctcatgcctgtaatcccagcactttgggaggctgagacaggaggatcgcttgagcccaaaagttcaagtctagcctgggcagtatggtgagaacccatctctacaaaaaattaaaactattagccacgcgtggtggtgcctgcctgtagtccaagctacttgggcagctaaggtgggaggatcacctgagcctgagagatcgaggctgcagtgatccatgatggtgccactgcactccagcctgggcaacagagcaagatcctgtctcaaaataaataagtaaaataaaatacaataaaatttgcctacattgaatgcctacaaaagccaaggttatttcttaggttatttctctcatttgatataatggataaattcattcaaatgcctcagtttccctatctttaaattgggaatcataggaatacccacctgcaatagtttactagggctatggtaacaaggtgccacaaactgggtgacttaaatgagaaacttactgtgtcacaattctacagactaggcatccgagatcgaagtgtcacagcactgttttctttctcagggctcctggctgtgtgctgggaatctttggtgttcctgatctctgccttcatcttcacatggtgttctcccctgtgtatgcctgtgtcccgtttccccttttaacaatggtaccagtcatgttgggacagggacccatcctactccagtgtgacctcattttgttttttgtttgtttgtttgtttgtttttagacagagtcccactctgttgcccaggctggagtgcaaggatgtgatctcggctcactgcaacctctgcctcccaggctgaagcgactctcttgcctcagccaccatgcctggctaattttttgcgtatttttaatagagacagggtttcgccatgttggccaggctagtcccgaacccctgacctcaggtgatccgcccgcctcggcctcccaaagtgctaggattacaagcctgagctaccgcacccgaccaacctaattttaatataacaaattatatctacaatggccctacttctaaataaggtcagactctgaggtattggggtttaggatttcaacatacgagttttggaagaatacaattcaacccatgacaccacctcacatggtttggtgtggattaaatgagtacaaaaattgctatgtgagggtttgctctaattattattagtaagtagatgtcttaaaggataacaacataagcaatgattactacttgagaacctactaagtgtcagatactatattgtcaaaaacttctaatcctcgtagaaaccttcaaagtgtgttttttatctccagtatcttcagtttacaaatgggtaatctgaagcttagagaggtgaaaagattttgatgtacctgaggcttcacaacttgtttatgattataaacaagactataatctctacttgatggtgaaactctttgaataatggaagaaggttttaaaaattcatacctccttactttagtttttgtgtgcaaatgcaatcttccgtataatgtattgagtttgcataatcaaggttctaaaataattttttagataggaagcttagctatggataaaaactgccaattcaacagataaaagatagtcattttgatcttgtcaataattactttaagacagtggcaggtacctgatttagttaacattcagtgaacagagtccctgaacctgtgctaggaatcccagtccaataaaaccttgctcctgccttcaaagagctcacagttagtttagagagtgtgctaaggggataggccacggggccaggcaagattcacggggccacggtgaggaagattcaggtttatgatgcgggtgtgaaataacttacttgggatcaatgaatcattgaagaattctgttttttatattctccccacccaggcaagagtgcagtggcacaatctttgcttactgcaacatctgtctcttgggttcaagggattctcctgcctcagcctcccaggtagctgggactacagatgcccgccaccacgccgggctaatttttgtgttttcagtaaaggcagtgtttcactgggttggccaggctgatctgaaactcctgacctcaagtgattcacccgccttggcctcaaaatgctgggattacatacgcctggtgtggaattctttaatgcagtgagaggagatgaaggccactttagctaagcctttaggttcattgaagaggccattcaaaaagatgaaaggtttgacatatacttccctatatcaagccatgcctgatttttcagaaataaggtagaagtttaatggatgtcatagtctaaaaatttgtaaggtaatcactataaatggagggaaaaaaacccagttattttctcttagggccatttctcatgggaattcagactagaataaaaggaagttatttataggatgtttaatacccagtccctcaccaggattctagatagaaaaaaaatatttctggagatggaaacgctggtttcagtgtcatgtggaaagttttgttaaacacctatcatgtgcaaaaaatgaatatcttctcgatttagaagagcatatagtctagcagaggaagatagatacttcaaactctccacctcacttgcctggatatgaaatacttcctgcttttgaatgaattacattgatgttgattaatgataatggaataacattactttgcatttggaggatgcttttaacatttcaaagtgctttccgaattatttctcctgtcaaactgtccaacaagcctggtgtggatgggggctgggctgacactggcactggcacagggcccccaggagcctgtcctagctgctacttttctggcaatgcctttcccttgcaatttcttcccagcccgcaccttctaccttttctctctagttcccacactgtgcttcctttgttttggtcttcctggctattgccttggattctctacatatcctgccgtgctctttgaagcaaagctattacagaaatgtaataaataataaatttcatcactcagacagatcaataaaatgcatgataagaagaggccattatggagagtgaaaaatgcgcaagaggatgcccacagcatgagtcaatctttagccaggagatgccaaataccaggcaggccattacggggtattttaagcttttatttgttagtacatccacagacatttgttgagggtatttttcccgctatgcccagggctaggcactggacattccgagacatactgtgtccagaagctcaacaatttagctgaggagatggatgatgcagccataactaattgtaatgcagtgccattgcctctgtagacaataggcagagagcagtgagagttcagagggggaaggaaccagctttggagaggaggggagagggggcttttattaaagcgaggaaattggacttcaattatacagtaagagcaggatttttctcaggtggaagagttgaagtaggtgtgagatagattattttcctcgggcaggaaatatcacatgcaaatatgatggatcctatacttactgacaacgtctagggattttttttggttcacaatttttattcaggtatttaaagtctttctcaatctgggacagtttagataagcagccttacttttccactaagcctgtttcccactaacctttttttttttttttttttaactgtttaaaaggataaggcccagtaagatagaagtgagcacaaaagcaaggggctgctgggctccattggcatagaatataggcagagtgggcttgggccaccagctgtctcctggggttctcaggcctggagtcctgggggagcctcttgtccttttcgcttctctagcctccttgaaggaagaatctgaagggagtgatccagccttattatcatcctggtcacatggagagaaaagatagaagggtgatgctctttcttctaacaccctagtttttgaatatatggcccaagtcagcatccttgaacttgaccagtcagtgacaatactcctcttccgtggaggaagggggaaggatgtggagagaggatgtattaatccattgtgcattgctataaaggaatacctgaagttaagttatttataataaaaaaaaagttttattttggctcgtgattttgcagagtgtacaggaaacaatggtgccagtgtgtgcttttggtcaggacctcaggaagattttactcatggcagaaggcaaagggggagcaggtgtgtcacatggtgagagagggagcaaggggggaagggagaagatgccagactctttaaacaaacagctcttgcatgaacaaacagagcaggaactcactcattactgcaagggaggcaccaagccattcacgagagatcttcccccgtgacccagcacctcccactaggtctacctccaacatcagggatcacatttcaacatgagatttggaggggacaaacatccaaactatatcagaggagcactgaattatatggtacggaaacatcaacttccaaccacaactttgttatgaaattggatacagggctgagataagatgcaaagaaggccctaggctaatagaagtttagtctgttacctccttaatctttttcttctgaattatcctcattcatttactctttattctcacctcccaggcacaatgctttagcctcttttgcatttctgccttttcctattaaggtagccattgataaattaattctggaaaaggagtatgcactttggagtcagaggtgggttcaaatccaagaactattactaacttagcctcatgaccttgaaaaagttgctaggaaaattaaataagataacataggtataatacacagtacagtgtcttgctgtacaagcattcaataaatggcatatatacatatattcactgttagtttttcactagtgatgtggtatgctggaaagaataaaatatgtagtatgatgttttacgtagaactgcttaaaaatgcctgtctcttctcctctttcaggtctctataaagtttctaacttgttttactttttaccagcaattctgtctcacttcctggcagacttatatttagttctctaatgctgaacacaaactgctaactgtccagccaaatccattctcttgttcccctttagtctgatcatgtcttctccatttctcagcctttttatagttaagtgtggccatcagactaagtgttcatgggtatggaatgtaagtagaagtgatgtgtgccatttccagtcttggccattaacttcctacaagcaattctctgtgttcttatcttccttccagacacctgggatggggatgcccggagcaatcttggaagccagtcagctgatctgtccctcagctgagtccctgaatgactgttgagccaattgcctcccacaacatacagatacatttgtgagcaggcacgtgcacacacacagaaacaaaacatttggaaataaactattgccttcaagccatttaatttggggtcattttgttctgtcagtttatcctaccttaatacccatttttatctatctccaagtttgactgagatcgctggaaaaacccaaattgtaaggtacttttgaaagagcactgaaccaaaagcagaactaggtttaagatacttttgcacctaacagctatataatctttttatttacctattcaacccttctctttcttactgaaaaaaaattataataatctctgtgacttagttgagctatttaacttcctggttaccaggttactcacttgcaaaatgtgtcatggaattattgtgcaaaattattaggatagtacatgtcataattttaaatttgtagagtcttctacagcttcactgtccaaaatagtagtcactagccatatgttgctattgagtacctttcttagtctgttttgtgttgctataaaggaatatataaaataggtaatttatacagaagaaaaggtatctttggctcgcaattctgatatctaggaaagttcaaggttgggcatctgatgaggcccacaaactgcttccactcatggtggaaagtgaagcagaaccagtgtgtgcagagatcacatagtgagagaggaagcaagagagaaaagtgggaagtgctaagctcccttaaacaaccagctctagcaggaatgaaaacagtgagaactcactcaccctttcccttccccaggaatggaattaatccattcatgagggattctcctccatgacccaaacacctcccattagtccccatctccaacactggagatgaaatttcaataagagatttggatgggacaaatatccaaactatagcagtacctgaaatgtggatagtctgaattaagatactctgtaagtgtaaaatacaaactgtatttcacaggtctagtacacaaaaagaatatcagatggttcattaaaatttaaaaatattgattacatgttgaaatgataatatcttgagtctagtgggttaataaaatacgttattaaaatgaattccctttttttcacttttagtgtgactaccagaaaatttaagattatgtgtgtgactcacattacatttctattggacagcctgctctagacataaagtattgtaatttagtgcaggcggatatcctctaatacttctgaatgtgagtcttgagtagtaggagttagaaagcaagatttctctaaatgggattgatcatccttactttgcagggctgtaattgggattaaaaatcatatatgcatagtgcctggtacatagaagtcactcagcaaatactagctgttgttctcccaccttttcctttcattccaaaagcagcttccacaatcacaggctatatggctttggatttttctcatttaggaagaaattattttgtttcctcttttaaattcattttttttaaggattggaagaacatttgtaatcacaaaaaaaagagtacactgaggaaaatgagataaaggaaaaccctgggggagaggagtgctggttcctagctgggatgagctagagttggggggaagatcttagcggtcactgcatgctgagtgcatcacgtctgtaacagagctgggagcaagtgttagggtgatgttgccagataccttcttttccttttttttaaaaaaatttactttaagttatgggatacatgtgtagaatgtgcaggtttgttacacaggtatacatgtggcatggtggtttggtgcacctatcaacccatcatctaggtattaagccctgcctgcattaggtatttgtcctaatgctctccctcccctttcccctcaccctgcaacaggccctggtgtgtgatgttcccctccctgtgtccatgtgttctccttgttcactcccacttatgagtgagaacatgttgtgtttggttttttgttcctgttttaggatgctgagaatgatggtttccagcttcatccaagtccctgcaaaggacatgatctcattcttttttatggctgcatagtattccatggtgtgtatgtaccacattttctttatccattccatcatcagtgggcatttgggttggttccaagaatttgctattgtaaatagtgctgcaataagcatacgtgtgcatatgtctttatagtagaatgatttataaatcttttggtatatacccagtaatgggattgctgggtcaaatggtatttcttgttctagatcattgaggaaccatcacactgccttgcacaatggttgaactaatttacattcccaccaacagtgtaaaagtgttcatatttctccacatcctctccagaatctcttgtttcctgactttttagtgatcgccattctgactggtgtgagttggtatctcattgtggttttgatttgcatttctctaatgaccatgataatgagctttttttcatatgtttttgaccacatacatgtcttcttttgagaagtgtcttttcatatccttcgcccactttttgatggggttgtctgtttttttcttgtaaatttgtttaagttccttgtagattctggatattagccctttgtcagatgggtagattgcaaaaattttctcccattctgtatgttgcctgttcactctgacatagtttgttttgccaggcagaagctctttagtttaattagatcccatttgtcaactttggcttttgttgccattgcttttgatgatttagtcatgaagtctttgcccatgcctatgtcctgaatggtactgcctaggttttcttctaggttttttatggtttggggttttacatttaagtctttaattcatcttgagttaatttttgtataaggcataaggaagtggtcaagtttctgttttctgcctatggctagctagttttcccagtacatttattaaataggaaatcctttccccattgcttgtttgtgtcaagtttgttgaagatcagatggttgtagatgtgtggtgttatttctgaggtctctgttctattcctttggtctattcgatttggtaccagtaccatgctgttttggttactgtagccttatagtatagtttgaagtcaggtagcatgatgcctccagctttgctctttttgcttaggattgtcttggctatacaggctcctttttgttccatatgaaatttaaagtagttttttctaattctgtgaagaaagtcaatggtagcttgatggggatggcattgaatctataaattactttgggcagtatggccattttcacaatattgattcttcctatccatgaacatggatttttttttcatttgtttgtgtcctttcttatttctttgagcagtggtttgtagttcttcttgaagaggtccttcttgttccttgtaagttatattcctagatattttattctctttgtagcaattgtgaatgggagtttattcatgatttggttctctgcttgtttattgttggtgtataggaatgctcgtgatttttgcacattgattttgtatcctgagaccttgctgaagttgcttatcagcgtaaggagtttttggggtgagatgatggggttttctaaatatacaatcatgtcatctgcaaacagagacaatttgtcttcctttcttcctatttgaatacactttatttctttttcttgcctaatttccctggccagaacttccaatactatattgaataggaatgatgagagagggcattcttgtcttgtgcccgttttgaaagagaatgcttccaggttttgtccattcagtatgatattggttatggatttgttataaatagcttttattgagatacgttccgtcaatacctagtttattgagagtttttaacatgaagtaatgttgaattttatcaatggcgttttctgcatctattgagataatcatgtggtttttgtcattggttctgtttatgtgatggaatacgtttattgattagcgcatgttgaaccatccttgtattccagggatgaagctgacttgatcacggtggataagttttttgacatgctactggatttgatttgccagtattttactgaggattttcacatcgatgttattcaggcatattggcctgaaattttctttttttgttgtgtctctgccagacacaggatgctggcctcataaaatgtattagggaggagtccctctttttcttttgtttggaatagcttcagaagcaatggtatcagctcctctttgtacctctgatagaattcctctgtggatccatctggtcctgggcttttttggttggtaggctattaattactgcctcaatttcagaacttgttattggtgtatttagagatttgacttcttcctggtttactcttgggagggtgtatgtgtccaggaatttatccatttcttctagattttctagtttatttgtatagaggtgtttataatattgtctgatggtagtttgcatttctgtgggatcagtgggatatcccctttatcatttttgattgtgtctatttgattcttctctcttttcttctttattagtctagctagtggtctatttttgttaatcttttcataaaaacaggtcctggattcattgatttttttgaagggttttttgtaggtctatctccttcagttctgctctgatcttagttatttcctgtcttctgctaggctttgaattcatttgcccttgcttctctagttcttttaattttgatgttagggtatagctttgaggcccttccagctttccaatgtgggcatttaatggtataaatttccctcttaatactactttacctgtgtcccagagattctggtacattgtttctttgttctcattggtttcaaagaacttcttaatttctgccttaattttattatttacccaggagtcattcagaagcaggttgttcactttccatgtagttgtgcagttttgagttctaatttgattgcattgtggttggagagactgttatgatttccattcttttgcttttgcttagaagagttttatttcaaattatgtggtcaattttagaataagtgccatgtggtgctgagaagaatgtatattctgctgatttggagtggagagttctatagttgtttgttaggtccacttgctccagagctgagttgaagtcctgaatattgttattaattttctgtgttgttgatctgtctaatattgacagtggggtgttaaagtctcttactattattgcatggaagtctaagtgtctttgtaagtctctaagaacttgctctatgaatctgggtgctcctatgttgggtgcatgtatatttaggatagttagcttttcttgttccattgatccctttaccattatgtaatgcccttctttgtcttttttgatctttgttggcttaaagcctgtttcttcatagactaggattgcaactcctgcttttttttgggctttccatttgcttggtaaatattcctgcatccctttattttgagcctatgtgtgtctttgcacgtaagattggtcttctggatacagcacaccaatgggtcttgagtctttatccaatttgccagtctgtgtcttttaactggggcacttggctcatttacttttaaggttagtatttttatgtgtgaatttgatcctgtcatcttgatgctagctggttattttgcacattagttgatgcagtttctttatagtgtcattggtttttatattttgatgtatttttgcaatggctggtaccgatttttcctttccatatttagtgcttccttcaggagctcttgatttggctgttgatacttgtgtatgcttcatgaagttctcatgctgtgtttttcagctccatcaggtcatttatgctcctctcaaaactggttattctagttaacagttcctgtaaccttttatcaaggtgcttagcttccttgcattgggttcgaacatgctcttttagctcagaggagtttgttattacccaccttctgaagcctacttctgtcaaatccatctcattctttgtccagttttgtacccttgctggagaggagttgtgaatatttagaggagaagtggaattgtggtttttggaattttcagcattttcgcactggtttttcctcatcttcatggatttatctacctttgatctttgaggctgatgacctttggatggggtttttgtgtgggggtcttttttgttgatgttgttgttgctttctgtttgttagtttttctttaacagtcaggcctctcttctgcaggtctgctgcagtttgctggaggtccactccagaacttgttcacctaggtattaccagtggaggctgcagaacagcaaagattgcttcttactccttcctctggaagctttgtcccagaggggcaccaggctaatgctagccggatctctcctgtatgaggtttctatcgacccctgtcaggaggtctctcacagtcaggagacacaggggtcagggacccacttgaggaggcagtctgtcctttagcagagctggtgcactgtgttgggaaaatcctccttgtcaggatcagctgttctctttagagccggcaggcaggagagattaagtccacagaaactgcggacttaaccacagccacccctccccctaagtgctctgtcccaggaagatgagagttgtatctgtaagcccctgactggggctgctgcatttccttcgaagatgtcttgcccagtgaggtggaatctagagaagcagtctggccacagctgctttgccatgctgtggtgaattcagcccagtccaaaccttccagtgcccttagcactgtcaggggaagacagcccactaaagcctcagtaatggccgatgcccctccccctagcaagctcaatggtcccaggttgactctggactgctgtgctggcagtgagaatttcaagccaatggttcttagcttgctgagctctgtgggagtgggacctgctgagtgagaacacctggctccctggcttcatccccctttccaggggagtggactgttctcctgtctcggtgggtttccagatgccactgggatacgaaaaaactcctgcagctagcttggtgtctgcccaaacagccgcccagttttgtgcctgaaacccagggccctggtggtgtaggctcaccagggaatctcctgatctgcggattgcaaaaatctgtgggaaaagcgtagtacccagggcaggtagcacagtccttcatggcttctcttggctgggcgagggaggtcctctggctccttgcatttcctgggtgaagtgaagccccaccctgcttctgctcactctctgtgggttgcacccactgcctaaccagacccattgagatgaactgggtacctcaactggaaatgcaggaatcaccctccttctgcactggtcttgctgggagctgcagaccagagctgttcctatttgaccatcttggtccctctctcgccagatgccctcttttaaaaattcttaaatgtatttgcagtatcaaagttgagactacttttcttctcctttacagccttttcaatatcaccatctccctaagtatgcagttacaagaggtaacttctctctgtatcttatctaaggaaactgagagcagttagcttctttggtatgaggaaaatgggttcaagtctagcagttcctatttaaagacctttccttagctaatgcttttctttaatcaaatcaccgccccttagattctaaaggaaacaaccattatcctaatttcaggaatgttttatttttctttgtttttggctgaagatccataattttgactgtctaatatgaagcaggtattttccaatacttctctctcagaaccaaatacttgttttctcctcatatctcctcttgtcttctctccttttccttcccttttacctcttccctcttctacccttttccttctttccctttttctttctctcccatttcctcctttccttcttccctctttcttttcctttgtttgttcacgtgacagaggtggaaagaggatgacacattaggaagactgagaaactatcccatttgtggccacctagaaaccagaagttactaagatctagcactaatcaatttcttctcaaagtaccgatttaccttgtattaacatggctttcaagatactctttagactagtgttcccctcttactttctgaatgaagactatttatgttttcacttgaggaggtgaccctgagagattagggtatatagtcataagttacttttttaaattatagctttatagagataaaattcacttactataacattcaccagtttgtagtatgcagttcaatgggttttaatatactcacagcgttgtgcaaacgtctccactctttaattgctttatttcttcaaccttctacaaactaagtatctattaatagacattttcctttgctttcttctcccagaaactgccaatctactttctgtctttataaatttacctactccagacatacattttctataagtggaataatataattgtgacttttgattttttattttaattttgtgattttgtgactgggcttttgtgactggcttctttcacttagcaaaatattttgaggttcattcatattatagcttgtatcaatacttcattctttttattgccacatatattccattctataaagttaccatatcttttttttctacttatcagttatagccgcttttaggatgtcattaataatgttgctatgaacatttatgtacaggttttgtgtatatatgtgtctttaattctcttgggtatatacttaggcttaaaagtgttgcatcatatggtatgtctatgtttaattgccaaactgttttcataagtggctgaatcattttacaatcctaccagaaatgtatgagggaaacaatttctcgacagccttgtcaacacttactattgtccatcttttttattttagcgatgtcagtgactatgaagtgtgtcttgtggttttgatttgcatttttctgttgattaataatgtttaacatcttttcatgtgtttattagccatttgtatataatctttggatgaatgcatattcacattctttgttcatttttgagttgtttgtcttttttaattgttgagttgtaagagtgctttgtatattctgtaatataagttccttatcagatatatgatttgcaagcattttcttccattttatgtttgtcttttcacttccttgatggtatcttttgaagcatgaattttaattttgatgaagcccactttatttatttatttatttgtgtcacttgtactttgggtgacagatctaaggaatcagagcctaatccttagaagtttctctcatgtctttaaaaacacatatacataaaataggatggtttgcaatttctaagcagttcttgtcaggcttcaatggcttccagacaaagttttggctgtgctagcaaagaagtgttaaaatcttattttcatagctagccggtggtgtgaggagggcacagctgctaggcatttggacactgcagcaattgctttaattggacattcctcacccctctagtctgacttgttaatggctttttaagtgagacacaccagccaagtgaattagactatttggcaagtcaattcctgctcacttggaagcgttaatccatggaaagtaagcagaggccttcagccaggaggaaacctgaatttcatttgcagaggtgaaagagaaagaactattgtctgcagtctcaggagtttccaagtacacttccaagggctgactggaagaaaggtcttcttatctaactggctctctctctctctcaaccccactttttcaattcagcacatatttatttttcccttcaacatggctatgaagcatacaagtgaggtctgtcgtggtgcctgccctgtgaagcatctatgcatgagaaacaggagaaaaatacacatacaaaataattagcaataatttgctaataatgtaatctattttctgttcactccttgacttagcatattctgacttcagtcaaccactctacttaaattgttctcttaaaaaacaatgacactcaccagtaacctcttaggtatcaaacttgatgattttcaaaatctgcatttgtagcttcgacctttcttctgggcttcatcctgaatttccccggcctgtcacacatctttacatagaaatcccagcagcacatctttcacacattgaaagtcaaacttctcctaccctttttttttatcgccttttccaccttcaacaatgtattctcctcctctgatcatggctaaacaactactttaattagcaaattctcccattatcacccgcatgtcactagttttagtccatttacgtgacttcctttctattcccactccttcgtgtaaactttctctttcctaaataatacaagttaaggcctcttccacacccaacttctctaatcctttgtctacattttggctagaatcatttttcaaaaccacaaactttatcctgccagttcttttttcacacatcttcagttattcttcagtgcctggagaataaggtcgaaatctttgagctgcttttgtagacctgctcattcttgcctcaacctctctttctagccttgtctcacatagcactaaacccttcactgttctctcctcacatcatggtcatctgtacatccactctctttcctctccctgaaataccctttcttttgactgtttggtaaactcttagtcattctataagttccccaatccaaagtgaacttggaaagtcttccttgagatccacggcaacttgcgtagacttctgttatgattcttatcatacttctttgtgcacaaatttttctcttgctccaatcccttactcttgtctcctctgatgcatttttcaatctcttgctcttgtttattcctttctcaaactctctctacaccatacctccatctataaaccgttctgctcctagataagcagggactgtcctgcctgtgcaccttgcttagtgcctcactcagaagatacgctccttaaagggcctaaggaaggaatttgctgaactaattatgattaaaactatgattaaatctcacccatctaaaggcaaacatgctcaggtttcaaattagtctgaagtgtggtttaaggggctttttaaatgtgacagtttttgttgttgttgttgatagatggtggggagcgttggtatggtgggaaaaaaaccagaaaaaccaaatgtgaggaatttagtgatgcagaattgctgatggagggccagaggccatccctggagtggctcatctgaccctgtatacgatgttcgtttggatgggtggctgtattgtaatagtcacttggacactggctttagaagtcagaagagatttgactcaaggcttttataatatgtctctttcatggtcatctgcctaacttatctgaacttcagaatctactactgttatataaatgacctccccccaaccttgagggttttgtgggaataaataggataatgcttatgttgtgtttagtcaagttctttcatgtggcaagcacttaccaagtgggagctatttcatgtttacgtttaaaaaagtgtgtatctgttatctaaccagcctgggaaaatacagatgatatttctattatattttaccagttcccttgaggatggcccccccttttttttttaaatttcttgggctggggaccaagctctcattcctgaatgctatgagtactgagagagatgtgctgtcaaagccaatgaacggcagttgtacacactgacattttttcagaatttgtccttgggggtatttaagcagcaatgtccaagactgtaaacacagctgagaaatgctgttattacatttaagaatctcttttctgtaatattaagacatcttgatttaattggtaagccgctctgtgatagcattcaatttaaatgaggtttgtcgagtggagaatcataaggcaatctctcatggaccaaggattgctgatgaggtctaccttattgccatgtgtcagaaattaaatcactgtctattatcatgaaccagtcaatcagattctctttttgattagaatgcactagtgggggaggtagagaagtgagaatttaaaagaattttaccacttccatattgtgttgcttacttcatggtattagaaatgctgttggctcactatactagaatattatcaaccagtattttcataggaaacaaaaatatagacatacacacatatatacactaaaagaatggaaatctgaaggaaatagagaggaaaatataattttgtctttaaaaaatcccagaagcccttagactcccatgattaggattatattcaacttatacattcttctgtgtcattcttccttcagtaaattaggaacaactaatatgctctgcctcctttctgaataaggaagtataaatggatgttactgaattccctcaagtcctgggcaaatacactatcacaatgtctttggtttgcatgaagatggaggcgctcatttataatgtgaagcctttcaccgttaaagcttcacgtgaacccgaactgacacagaatcaaagctttcatgagagcaagatggaaagagattatgtcaacacaccccatcccaaaatgttgtaaagtgccagacttcttagggtattccatgacactgctagaatgtttctcatattcagtcacgtagatcattcttttactatttgttttcttttagatgagttcaattggagcctgcccgctatggaaaattattgatgcaattacattaatcctgatcaccatggtgatgtatagttataaaattggcttaaaatactgtaaggcaggaaaactaggcaaccttaactcttttagcacaggtggccctctttgcagagcattctgactttcttagtttccaatattctagcagatggcatgggtagttgggcacaatcaattttcttgcattgcctcacatcttccagtgagattttgcggaagaatggtgtgtgcaccacagatcttgggatcattcaaaggattctcaaagctcctcaatggccaatcagcagtgaagagggaaatggtggtaaatgaggtagaagccctctgtgaatgaagtaatgttctggaaggggctatgcatttggattttcattctggtaattttctctatgaccttggaaaatgactttatttcttcgcttttgcagatggaatgaattataaaaatggttctgtgaaaccttgaaaccataaaatgctatacagatgctaaatatacagaatttagcacgcgattttcctctgttcttaggacagttactatttctagatccaagtggatcagggaagaatagtgctctaatgctctgagaaggaaacgagtgttaagctggatactggtgtgcttagctgcaattaaggaagctgctgtggaattagtgactcacccttcatcaggatggaaaaactgtctcatgccgtgtttttgatttctctcccctattcagtttgtttgaagtctcttttgtgataggagaaaatgacaattactctcctcttgtgtttccatttttggtaagcagtgggcagagtttacattggatgaaatttcaaaagctgtttttatgaaaaatcacttcctctgaacaatgggaaaatggtgagagagagacgatagttggcttttagtctaccaggttcaacctcctgcaaaagctgaattcaagactgccctataggcattgggaatctagttaatgccactatctgcctgtgaatttcctgccttaaactgtctcggattatacattaagctggttttttttcccctataatgtgtcagaaaacaaaaattcaacaaactgagcttacagatctaattggcttttattagtgattcatgaatccgttcgcatcccatctgtgaagcaacaagggcctcttcagggtgtggcagaagagtggttttcataaggcaacttgagcaggaacaatgaaacagcaagtgcaaaaaatgattggttaacatcatattacttcaggttactttccttgtataggctaaagcacaggaggcttccttatcatcctggttcagctagccttctgcgtggtttctgcaaatctctctctctctttttttttttttaaactggcccatttgtaagttcagtttgattatgtggcacctagcacaagtgacaccattctggtttggtctggtctgttagagccaggagcctagtccaaaacattggcatcccataaattttattcaatgaatgtttcctatacccctgtgtcaatttcatctcctacatgaatccatccccctccctttccctggccccttatactaactgagttgtttgcgcttgggaggaatacaaagtattttcaatacatggctagcatgaacaaattatagttaaatgatacattttgtagaaaaagcaatgcacactgaggtcatttgcctgcagatgttaaattatctgcttttttgtgttactatatatgctgtagcacttatccactggtgtaaataagaaagtcaattgaactctctctgtctggagagagagaaaatgagattgagaataaagtcttgcagaggttgcagatggccctgtaaggctgaattcagcccttgcgtatattttgttcagttggtacaaagttaaatttaaatgcagttaagtggctttcaaatgcactttgctacagtccccactgctccttagtgtcttatgccctatatgtttcactactttgttgcctacgtagtttctgaatgaacttgaacttgcaacccctcgtttaaaaacttgttcctgttatgaaactgtgggtgcttatgctaaggacttaatctttctctcttgcgtgggaggaaaggatatctataacagaacaataattgtaaactagaagagtagaaaaaaggatgaaagaaaagggcaatataaaaggcaggaaaagtaggggtataagaaaataaaataaagatcaaatacatttattactatgagagcttctatgcgggaaaaggaaaaacaaagtataataatacaaggcaaccacataattaaataattttttcaaaagactgtcagtggtaacacacacacacacacacacacacacaattaggaaaagctacaaaagagccccaagtctaacttggcaaaattgaaagtatgtgatagttttaaaataaaaattaaaatactttaaactagtttaaaaatatatctctacttcatgtacatctgcactgtttgacatgttataagaagtgctaaattatcttaataatttaagaagaaaagaaaagtaatggtcttccttctctctctccaattctaattccttggaatagtcgtttctaaatagattgcagatatgttcacttttcaacattgcttatataagagaaggcaaggtatttagaatttttcttgatcataacaaaaagacactgaaactcagaggcagcaagaggccccattatgggggcaaagagtagcagtggaaatgaaagtgagttcctgaacaagttgcttccaacagggtaggtgtattttgaagtggcgttgtaagtggcaccctactgcttccatgagtttaaattgtatcaactgaatataaagtataagccaattttaaaatgagaatttgtagaattcatgtgattagattagaggtttttaaaaagtaatatttgaattttgccaggggggtggggtggggtatgtattatgtgttcacgggatgacagcagatatcttcaaggaagtggtttggagtacattaagttctgaacacataaaatgactttttttttttttcctttttggtcttcaggagacttgagaaaacaagtgctgtgtaagttataaacaggatgaatggaatagtgatttcacaggagttagaaaaatactccagtcacaaaagttaaaattagagtaatctgaggcattctcagtactttggataccctgtccacattcagggctactgattatatttccaaagaaacttataaaaccagatgtctagctggcaattggttttgatgaatctccaaatctcagcaatgagaaaatttgacagttgtcagacagcagctagctattacgagtgagccagggaattttcttatctgttacaagtatagaaccattacagggagatactgcatcatagtgtcatgtttataaagaaggcttcagagcacatggtttaatccccaaatttctaagaatgacagttcattttcttggatgttgaaaggtgctttaatacctatacaacatgaagatggttttattatcaccaatcaaaatgtcttggtatttcttaatttaaacaaattcattttataggaattacattgctgagaattcacaccatgacactgacgggacttataatagtggttctaaagcctgcatgtgcgtcagaataatttggggatttgaggtgacttgttaaatgtacagtcactgggtagccccctgtaagattctgatttagtacatttggggtggaatccaggcatctacatttttaaaaagcaccatggccaattctgaatcatggtcgggtttgaaaagcactaagtttgggcaggcctgatttatttcaaagaattttcaagcatatttagttgtgccgttcagtaatagtagcttctcttattactgtgtgtatcccagtaaatctcttccccatttactctttcatcgccccactttgggttcttctgctctgccgccatctatttggcctgtacccactgttcactaatgaaagcccgtagcttctaaaatgggccaagattcacagttgatataagctgagaaagactgacaagttattctgccgaatgatactggaaaaaagaataggatagagggctaatgatgttattttatttttgtccggtatctttacacccttagttgctttttcatttgtcaaatggaatctcatgtggaatctcgctctataaagcagatgaaaaaatgtggacccagtctggctgccagtcctgcccacttggtttccctctgactcagacactggtatcccaggcccctttgtctcatgtgcccctgaaaactgctgtgacatttaagcttttgtgtctcacataaaggcaataagcatattgcaaggttttcttttcttcaggtttcaatactctaacagatatgttctcaaagtagaattagtccttggttaaaatgagtcacatgtaatctaaagtgtttttcctcataaacccatctccagcttttatggtgaaattcaattgtaaaataagatgaggtgttaagtttaatttttttgaagaagacgttcattccataaatatttatcaagcactctctagttatgacataattcagtttctaacgtacagtacacctcttacaaaattgcataatctttaaactgaaaggccaaatatcttcatcaaatactgcttcttcagatctttgcttcctcagctctttaaagaaatgggcacctttggcatggatgggtttatatccagatgataattccagagccatcagggtttcagtttttgctggcaaagaaatcaattttattgctactcgaaggctcccctgggatgaagcaatattggaggaggcaatgcattctagaatgtcaactttcagaggtttggagtttgctcaaaaaataaatgatctctgacttgattaaacttcttttgagttcctactatatataagggcctgtggaagggctgggtaccccggcattgtaagatgtgactgcagccctcaaggggtttgcagtctagctggaaagaaggatctggcaataagaaagcacagtgagcccaaatgaagtgttcagattccacatactacatacagaatgcatcatgtaattgaagaaatagaaatcaccaggttacatggcagacctaaaaaaattcagcaagtctttttgaatgtacttgtgactgtcaacatttacattgtccaaaattttcttgtcaggtgagggcatcaaagaactcttaaacgctttcaaatgtggtgggagcatcttgcttctgtgagaagatttatattctccctaccttctcaattctgtttccctatcttatatgctataaacaaaacctcgctcacgaaaataaaagatgaatgcatgttctgaaagaatacagaatcatgacagctgaaatggtcatggtttcttttaggagatgaaaaaattaaatacacaggtgaaaacattagaatgcaattctctaggttaccatatgcttacaaaaaatcaaaaggagctgcagaaatggaaatttctaatgacagaagaaatcaaacagcagatacagtagagactttagagataaatgggtgtcaatagtggtaagaacacaggttcagaggagatccaatgttccatctaaatcctggttctgtcactgagtgggaatgattacttgatctttctgtgtcctcgtttcatgtgacaatatctatcacatgcagtgttgggtaaaacacttagcataatgcctggcacccagtcaatgtgcaataaatgttggctattatcatcatcaccacctccatcatcatcattctctaataaaagttaagcccttctctctgttgaatacacccatcagttaataccagtggctccttttaaatagcttaaaagcaaccaacattctatagatttcagtggggaagattgtaagtgaaatgggtgttgtgacctttcttgaaaataacccttctctctattagtatataaatgctagtgctgagtacacatactctgaagttgaacttaattaatttggggcagtagcattttcactgttgatgagcttgtatttattttctttggtttacaaagcagctggtgttgtccaaaaatttagaaacccctttccaaaatttaaatgacccccttcattcccttcatttacactgttgttctagaacctgggatgacactctgcagggtgaatggagactggtccctctgtcttcttttccatctctcttgctttagttttgctttcttcttcttctttttctttttctttttctgactgaagcatggaataactggctggtgttcattgagctaatttccttacctgcttcagggcctttgaacccaaagacctgtaggtgatctgtgactatggcaagcaggaagccttggggaccactcttcacatttggagtaatcctggtttgaaaatgtgtgagggaagccaggcaggcagagagcactatgtggctgctgagttagaaaatgctgaaatggaaagatgctggaatagaaaatcaaatgccatttattcattggcctacactttcactagtaccttcctggcagccttaagcgtattctttgtggtggtggccttttgaatgtcaatctgtggaaggacttctgtttttagcaaaggctgatctttaaggcaattaggtaacagttaaagtaatagtccccagttattgaacacttgctatgtacagggtactgtgctcagcactttccactatttcattcaatcacaacaacagccctatgagatagggtattattatcatcagtttgtagttgaggaaattgaggttaagggataagtgacttccccaaggtcacaggaagtaagtcgtggagatgagatatgaacctagcctttctgatttcaaagcttgtgctgttaaccactttgctatacttcctcatgtgtgtttaatagggtccagtttctactgaaaggatattttaattttgtgataaaacaggacaggcctaaaaaattaggtgcagactctgaataaatttaatatatctacccatctctcttattcctcttaagctcactttaaaaaatctctttttaaaaggaggttttctttttaaacctaacaataaaccaaggacatccgtccaagttaataaatatgtgccttttttaaaaaatagaaaaaagtctaattgacaagtaaaaattgtatatatttatagtgtacaatgtgaggttttgatacacacacacacacacacacacacacacacacacacacgctgtgaaatggccaaatcaagcttattaacatattattaactcaggagtttattctttatattatattcttaaaatctaattgctttgctatttttaagtatatagtgttattattaactattatcttcatgatgcacagtaggccacttgaatgtgttcttcctatccaaatgaagtttagcccccctccccacttcaagtatctgtcttttaatggctacataatatagtttggatacattatattcaattagccttttgttgatttggatatgccataatctactcaagcattcctttattgatgggctttcaagttacttccagtttgttgtcagttaagtaaattgtttacttgaaagcttccattgtctgggtctctaccactatgggacccattttgagtgttggtgatgctcacacaacaaggagacacaagcccggagttgagctcctaggtgagagagccatccagtagccattctggtccaagtcctgtccctaccacttacctgccacgtgcctctgcacaagccatctggcctcttttaagtctcagtttcttcataagaaaaatgagaaaaacagtgctgctctcaaagaatgaccatgaggacaaacagaataatgtgcatgcagggctgagcacagaacctggcatgaagcaggtgccaaacagcagagcaactgcattgctggaacccagcagaaacatcctctcactggagcttggatgggagctctctgagggccctaactcccctcttttggcctaatgcattatagggactccgtaaacatttgttaaccaaaaaatgtttggaaaactactactgttctgagcggtatttttcgtttcctttctatatttttattctaacagtcactaaaccacattttgagagtatctggaatggagaacctccagtggtttaaatagttttaccaaggaaatgtttttcacgcggaaagaagactgagatgaaacttatagagaccttgcctcaccctttcatttgccgaaaccatgtatttttgaatctagtgtctgagctcttaaccactaagtcatattgctttaataatgatgatgtgataataggtaccatttattgagcacttactgtgtcccagaaaaatgtgctcagcacgctttaccaatgatcccttaatcatcacagtaatcctgagagaaatataccctcattgtctccatattctatttggggaaatggaggcttaaaaagatttaccaaattttcccaggttagtggaaccagtactccaacccagctctgcctgacaccagtgccactgtgctaattccatggcaggctgtggtgactatgtatttattggactctgttcatatggaaagttgtatgcatacagaaacaggaacatttgctgtaatacttaagggagtgaaagaggaatgtacagaaggctaaaagaggtgagtattgctttgtcaattctaatgtctttctatgatgttgatatttggatcatctaagtaagtgctatgatgaaaataatattcaagaggctggtctggctgtctgtagaatgaggtagatgtagtgaaagctggaatggaggaaagcagctaagaagctattgtagtcgttagacattgaagtaaggaaatgtggaggagaaagatggcagtggaattagagacaaattgacaaacaagcgggtagtaattagaccttcatccaatcacttgtggggagtggggagcatggttcatcatccttcaggatggatctgtccctggagattggaaacatgcacgcacacatttcttacttccacgttcaaaactatggtgagcattcacagctggtatttcacaacctcttggattcatgtttattatatcctggatgaagaagcacttcctttcatctgaggctcactgggcccagggttgtgtggtgacctaaaggccgtatctatgaggattttgtctaagagtacctcaggtaagggctctcaggaacagcttcttagctgagccaccatgctccagatttgatctttaatcttatgactatagagaatgaatattttcaggtgactcagttcagtctctacctcatgaaaattaaattgaaaaaacaatatagagattatagttcaagtcctctgctactgtttaactgtgtaaacttgggtgaatgatttaatctctgtcagcttcagtttcctcatattagcatgggatggtccttgtaagatactatgttggttaaatgggcccacgcatgcaaagcacctatagtgcttgggacactgccaatacctaataaatattatatgctaatatttttatgattgaactataaatcataactaccttatgtaatatttttttatatgggtatcaagtctaaaacctccatatcaagagctttctgagccctttttgtcacctcgtctttcccctaccccaattcttgtgttgaggttattgggaaactgcactgttaatcagaaggtagctcagttaagtgtggactcaacgaagaaagaagatcattgagatgtgtaatattgaagacctgggaaagtgacaaaatatttatatcctacaatagcagaagcctttatgtcaatggaattgatttggtttctcagctccactgtctcattcttttggagacttctgggtaaacacattttgctcctctgaacactgtatttctcgaatgttcctccctggcagtcgccatgttctttctgtgaatttgttagaatcacttattaaaccaaagtcagggtcaccccttgtggggcttagaagtgcttttttttttttaagccttttatctgttgatgagctttcgtttctgaatatgaatggtatttggtcaaggtaggaagaggtttgaactagaacaacaactaaaaggcactggatggacaaatcatatttaaatgtaacggctgtaatcagggaagttgaaatagggagataagagaggttatccaaagttctgtgttggttggataagacattcaccgttattattttgtacaatatacagaaacaattgtctactcatacagctggaaggagccatggagattacctctattccccacattttacagatgaggaaacttctcagcgagtagataatagcctgaaattctattacttagagcaagcagggaaagtgttaggagggagttggggttagctctaggcagccacatcagcataatagtagtggcttcaatttttcttcatattgcactgaattcatttgtagtaatgaacctatctgtctatctatattatagtcatcaaattatcttcagtaactatgtaggtgttattagtttaaacctttaagacccatgaaaatacttgggttcaccaagcacgtctgccatatgcacttaaggagattcttcactgaatagtaattgtagtaactgctgccctgctcttgtaatatcttctataaaaataataatttgcacttcaaatgtctctttctgtgaggtgctcggcgtaccttgcaggaatcgcttacctaaatctatccttcaaggtggtgtatggaatagcttccagtggagtagctcagtaggaggagggaagagtgctgagaattcctagaatgcaaacctaaacctgggtttgttcagacataatccttagttatcacattagaataacaccttatattttcaaagctctttcatacttattgaattaatagagccattaaacctctctgaaatagtagtagtggatagtgtgacaggtgattaaaaccagatggagaagccttttttgaccctaacaacaccaaactgattagtgataaagccatacttcaagatgcttgactgtaactctagtgctcttttttttttttttttaactagattatattagctagagatttttcttgataagacagtggtacttttaaggcctttattcctctggattacaaaaaagtaagttacctattcctgattatatgaagcaagttaactgtttcaggaacatcaagagacctttaccacatcacaataaaactcaaggtcattttgctccaggagtacttatacaggtgatatttgacggtagtacatatcttgaagagaaaaaaagtcattttggctagggtaagcacagctaaagtttgacacggcagcttcaatgaatcatgcctctttttatggcacaattaaattttttgagaccaactgtgattttatcagctatccaggtcatctgtaggcaggtcatgattgttacatggggtggtgataattggtacaaggtcatgccctaagcatgttatagactagtagcccagcattgctaatcattttaaatcaagactacaaaattcaactgtagcatttcacttcagagcaaaaacattgcatttgcttgttcatgttgctatttcccttcccctccatgtctttctctccccaattctctcaatttgataggctgtaagaagcttcgtacccaccaaatgcaaccatatttcccctcagctctttattacaaacatgcacttttatcaaaaattttttaaaagactgaaaatgagactcagaatcttttatttatcacagaatggaccctggctcagctgcttattgactgcgtaaccttgtttgaatcagtttccgtacttagaaaataaggaaagtaatacttgcctcatagagtaattgtaaggattaaatgaatatataaaatctcaagcttagggtctagaacgtagtattttttcataaatgtaagtctctgtgtttctcaaatagttgtgtgcataggtatcacctacattgcttgtgaaagcttcagattcttgtgctcattcccgctccctaaggattttggtgcataggactggttaggacctaggaatctgcagctgcacaggtagatggtctgaggattatagttagaagtgccatgctgtaggttcaaagcaaatgggctgtataacacattcttcataaatttctgggttatggtcaaatttcctacgtttttcagagaaagaaattatagtgttcagggggcacttaactggaaataggtagcaacagaaaactggatgttgttgaatttatttattaattcaccgtatgttattgggcaccttctctttggcaaactttcccatagctgcagggaacacagtgataaacgaggtagagatggaggcagagcactaagtgagtaactccttttcctgggagcccagggctctattacccagggtatgctgtcttcagcataaggatgactctatcaagtaggtctgtagatacttccaagtctttactgccgaaactctcgcccttgccctagaaaggtgttgggtctcaaagggagttgtctcagaggaagggcaacctgcagcctttattttattgggaccagacccagcatccctggctcagattcagatttactgttcttatcatcagatgtggaataaaggcttctggaacagcagatgtggttttctacctatgaaagtaacattctctaaagcctagaggatggaacttgatctctagggataaaagagcaacagttgctcttaggatcttgtctaacaattggcttagtaggtgctaactccaattctcatctacctgctccatcttgattttagccacccatctaagcttccacttgccaccctttctgtgattatgccagccaccgactgtgctctctttggtccctcttggggcagagacaatccagaatgttgggaattacctgaactctcatctcatttgtctctccagccatgtgttaggctctgtggccacccacaatctcaggcccagctgttctgtaggaccagccctaagtggcccagagaaatattttctttgggttatatccagtaaaaggatatgcggatatgctcgggtcttgttgagaggcagcctggtaaatggagtgaaaacactagaagcaggcaatgccaatgtgaagtccctctgctccagccagcttcccaaccttggccaagtgcccactttctcaggagtatcccacctcccttccagaccagaaatgccgtagggcttgacagccaatttgcgctctctttcctacatcctgacctctttgactcaggtcccggaacttttgatccgcaattatgaatctcaatatacaaccccttgatcatgaccccttgcctcatggaactctctgtctcctctgtctagcccctgctaagcttcgtggactttgtcactaatctacttcacctatggtcttgctaagttgcttcctctgtcacctcccttcccagcccactcgagctctgtcctgccactgtccaaagtcaaaagaggcagaactaccttccttactttattttctttctcctctactttgctctttctttctctttaccagaacagagcatctgcaaccactctcactgcatttttttaccacgttttcttcagagtctatctgaaaatgaaatacagatttttttgataaatatattttcatactgaggttgaataagaatctgatctttatgattcttagacttgaaaaaatatatattttctgaaggaagtagactgttatcttcattatcacctccgtaaaattgcaaatggtcaaaaccataaaaaatggctttgctctatgtgtaataggcaaatgaagggaattcatggcaactgaaacccttgctttaaagtcagctctttgtgaatggaaagcagctgatattctgtaaatcctccccagatagggtttcttacagaaatactggcagactctctaatgactgtgactgctttgatatgaggatgtggtcaatatctcaagaaaaaagactgcaactttctaccttctgcagtatagagaagagaaaaggaagtatatgatgttctcacatccatctaactgagcaaccaaaatgctttataattttttaattgatttgtctggaaagagtccgttccctataggactcacagatctccatttatgtagggaagaaaattgtagtcctatccccatggctgcttgaaattccattattgatgtgatgagctctttgttcctcattttgatacagataagatattgaactgaagaaaatgcacaaaatatatctttctccactaataaaccgagaagtggtagtggtgccgtttgttaatttgggatttattttgctttgccaaatggatttgccattaatttcactaaggccacacaaaactctacatcagtgacatgcagaaatagaggtgagattgtccagtaagtagttgccagaatttgtcttgatgatgcttgatgcagatttaagagagagaaagcagatgcagtgtgtttcactggggtgccagagccagggggactgagactgccacaatgtgtgggacctttcctttctgagcacagcctggtggcagtcagcctttccctccagcccccacacaaaacaagtcggtcaagccatgcacgagtgatcttgatttgaagagagagaaagaaatttgatccccaagtctcagagctgaggtacttatgcactgaactccaagaggcatttcatttctaactagcttagaatttcccacagtttgacagcaacccaaataaagaaaatacttgaggaagcaaagtagatgtgctggaagttgagggcattacctgatggctgaatgaatttgacaggcttttctcctgttgttttgacacaattgtattttcctctacaccgctgatggagtgctctgcctaaccacgatgtacccaccttccgtggctcagctgagggccactttgtcaaatatctccatcttactcattcctcgccgtggccctctcccaccagggacctcccagatcactctgtcacccccaagactacacatttcggcactttatgccgccttgtcttaccctttttttcatgttttattgctgcatggcatttaatgttattactacagcaaaactgtatttccctagagggagggaatttgacttgttctggtctcaaactctaaactccggtcagttgtgaagaagcctggaaccaaatttgcagcccatctccaggaaagtgtatataattgtgtggtggatactgtgggtcatgaccctactcacggctctatctaattgtttcttctccctcttcccccttcctccttgttgtcagtcttttctaagtttctttcaatccttttagggattgtatggagtataaataaccttccatatgctaagccagaagttaccaacatgggtgtttcctgacgccaggcaagtaatgtaatataatgactcagccaagggaagagggcagggcttatctctgcacagctgcagtcacttgtggccatgctggaatgagggccctttgttgccaaattttcagatttttcaagagaagttagaaatacagagtcttaggcaaacttcacaatatttaaacatagacagctaaagtatgggaatatccttggtgattcccctaacctggaaaacatatttgggtgccatattcagtttgtgcaccaccggtttgcacaacctgctttaaagtttcatttggtaggtatccagttataatggaactgactctcctactgtggctttcttagtataaggccacatgccatgtgctgatcagcaaacgctgttgaaggattttgaaaagactggaaaaaagaaaactggttgtctagttatctgaagaccctgggctgtgtcacatccactatgaatacaccctccaaaatctgagaccttgttaatgagccctgtcttctctcccagattctaactgctcttcagcgttgtgacttagaggggatgccgtaatgcatgtgtgcctggaacccagggaggcagaggtcctctttttcaccctaatgtgaagcatgaagttagaatcatctctgtgctccctaatagagcctcatgcagagctgttatcattctggataagggattcatgggcatttgcatccataccccccaaatagtggttcctgagaaaatttctctgacatgctgagaaaaaataaagaattcataaagttgaaattattgaacttattttgatattaatgtacttttttactctggttgtcccaaaatatctcattgggtatatttacttgacaaaatgaaaagttggcaactggccaggcacggtggctcacatctgtaatcctagcactttgggaggccaaagctggtggatcccctgaggtcaggagttcaagaccagcttggccaacatggtgaaatcccgactctgctaaaagtataaaaataagccaggcatggtggcaggtgcctgtaatcccagctactcaggacgctgaggcaggagaattgcttgaacctgggaggcggaggttgcagtgagccgagatcgcaccactgcactccagcctaggtgacaagagtgaaactctgtctcaaaaaaaaaaaaaaaaaaaaaaaaaagttggcaaccttagaacagttcctgtcatctctctttattgtttcatttctaaaagagtttcatttggttgctacccagttataatgaaactgaaatccacagtggtctgtgaaatccaagtctgtggccagatttgagccacaccctcagttaatgacagggccgggagagggagggaagggtggaaatgaccaggaacaccaggtacagatagaaaatgtccatcctcagtaagacgggtcacctctgtgaggggtacgtgtcctcattcagtccatactcaaaagagatgtatccaaaagctgttgtaagcagctcaggttttgggggcaggggctgaccttttctagtctttgaaagataatgtattactcttgagaaatgtagaattttattgtcagtgtgcttgaattcagcaaacagacccggagatgaacccaagggacaacgggctcaaagaacatagatgataccatggaactttgacctatttcatatgagcattcctgggcctgcatttgggactggctgccttgtttgttttataaattgatcctcatattgattccttacttgatggctgtggaaaagaagtctccttcttgtttgaactcatgtctttgtgagctgcctttatgcttattacataaaagtctccctgattcttgttgatttggcaagagacttccttgctgagaattttgcgggctgtggtatgggtgtaaagtggtttgctgtaatggaacagcttccagaagagaatccggtctccgttttgaaatgccacttcttggaaccagaagaatttattctaggagggagaaaagaattattgataagttcataattattcacaattatttattgagtacccactctataccaggttgtattttagacactagggctatagtaaccactaagcaaaatgcacagaaatgcttgtcttcagtggtcctatgctttattgggacaaaacagatcagaaacaaaataaaactcacaacatataagaacattacatagtatgtgagaaggagacaattctatctggaaagtctagcagagcaagtgtgatcaagagtttacaagaagggattgctgtttaaaccagggaagtcagattaggtgtccttgattaagtgatagttgagtgacagtgacaactttatttatgctttagaaagactactctggctgctttgggaaaagactgctgaaaagcatggagacctgtcaggaacccattgcaaaagtccttgcaggcagcttggagcagggtggtggcagtagaggtggtgagaagaggttagatttgggatgtatttcaaaagcagagccaatgtggatttccaataaactggaccttttaataaagctgagagagactttacagatcatttagaccccttccgaggccaagtaggtagcacaagggagtgaaactagctgcatgacaatagaggctcttagaaacagggtgcattgtcttattacattaaaaaaattaaagccgggcgcggtggctcacgcctgtaatcccagcactttgggagggtgaggtgggtggatcatgaggtcaagagattgagatcatcctggccaatatggtgaaatcccaactctactaaaaatacaaaaatcagctgggtgtggtggtgggcgcctgtagtcccagctacttcggaggctgaggcaggagaatcgcttgaacccaggtcgaggttgcagtgagccgagatcgcgccactgcatttcagcctgggtgacagggcaagactcagtctcggaaaaaaaaaaaaaaaaaaaaattaaaacaccgttcaagccaaattatatctgtaaagtcagcctatgaacttctaaactacatcctgtaagaatcaaacccattctttttacagatgagagatacggggtcttacaaagtttattgacttctccaaggtcattagaggcagaatcagaatcgaagcctcaggcttcctcatttgtagttcagagttcattcattccatctgtactcgaaccatgaacagcttttcctccttggtgctgctctgagtggatgccacccatgtagaatattcttttattttcccactggtgtagcgtgatgggtccattttatttttctcttcatctctatcatcaggtgtcatcttttaaaacttgtgagcccttggctgtcccagccacccccaaagaacacccttgggatttactgattggctcacaacagtaattgtgagcaatgaaagaataggctaacttagcctcctccctagtttggttgatcacagcagagagaggaagactaacaaagaaggcctatataaaatgggaactgagggctatcttttgcttttggcgtcttgatggatgcctaaggtggatcagtatttgtgtaacataacaggggtactttacctgtggggagaggagtgaccactgaaaacactgttcaaaggggtcattcatagtcgtgcatttataaatttttttaaaaatagctttcttttcctattataaaagacatgtatcttggtatatagaataatttgatatatttgataaagaaggtattgcctgggaaaggatgttgagaagattagctatccaggggaacattaagttgtattttcattttacattgttgacagaaataaaaaccttcatggattaaaatttaaacagaaaatacttttaaaaactctaaggaaatttaaccaatatttatatagagaaagcttttgaaactttaaaagcaatgaaaaaaataggaaaaaaaaacaagtaagatttatcacatgaaaattaaaacacaaacccagaaaaatattcacaataaatagtgaataaaaagttaacaaccttaatgtgcaaagttatctttttcttggataaaaatcccatggcatcaaatagagctgagaggaagagctcacagttcatgaaagaggaaatacaaatatggcaagtaaacttccaagaaaaggtggaacttcctagtaatcaaagaagacaagttaaactaaaatgaaaaccatttttttttgtttgtcagattggtaaaggttaaataaaatttttaatacgtaaagtcagcaagttaagacagcagacctgtttacatatgcctggtattaacataacgtggcatatcggtctgaaaagcaatatggcaacatgcactgagagccttaagatgctgatattcatcaatccatgaatctcacttttggtagcaatctaaatatccgctcgtaagatgtataagtaatttttgctatagttatgttatggaatgatgtatctggaagtttatttccctccacacatactctgtgccactcctgtgctttatgggagtctattgttaaaaatctcactgcttcatccagtggtaacatgttttatggcccacaggtgagagtcccatttatcacagaaactttggagtatacataaaactaaaagagagaaaaagaccagccataatcacaacattcgaagtcagcatagctaatattttcatattttcctttctaatctttgcaaagtacattcatagttcaagagagttttgcttaggtgtcatctctcaataataaaaacttctcaaactatggatcaattatgcatatgtgcacctgtgggtacattatacatttatatatgattatatataagcaagtttatgtcctattagtctctgaacctttccatcacatcttaaatttttaaagtttttataaaaattctaatttacccttttaaatacatacctgctgtgtgacgggatgttagagaacccaactctgtatctattttaacagcatggtggcttatagcaagcatgggcaatcttttatgactttgcccccaatctctcccaatctcctgtaattcaggcatttcactttgctcaaccttatctctgatcagcctcctcacccattactcatcatttcacatcaggaatccacaagtaagcaattcaagaaccttgaatggaacatgagtgaaagctatttctgcagcctaaaccccttcaatcaatacaagaatgtcagcaattctagagtctaaacttattaaattctcatattatttttaaaatgctagccccagtcctctttgtctgatttctaatctctgaaagaaacagtaaatgcaaacataggtattttaaagagatagggtggaggggggtgcttttccagggtactctcttatcattttcctgacaaacttatgtgatttaacagttactggtaaaacctttcaccaacagtttgttactgtgacagcagaagcactcaaattcagggaatgtcgaacttcatcttgtgaattcagacctggcagaagaccatttcttcactagaagttggaaaaatgtcactctctgagactgcaataaatggagcccagggttctgctttgtgtactgagtgagagaataatagtgtggtgtccctgtagacagagaagctgactatgctctacggagacagtgttttccaagatgtgttaagtgcaattccagcttctcggcttttgatagatgttcctctagaaatgttcattgctcaaaggcatttaggaaaagattcattgcaggactttaatatgctaaggtgcaatatgaatcaataagcacaagttgtagcacacaacatttaaacctgtatgagcatgaaacccttcttcaagggagactagtgttttccaaggcctgctttgggaaattcttcattgggcactttgcttatgtagcagatttgaatcttagtctgtaaactcagatatgcaataaatagaacatttcacatttttgaaatattaaactctgattttgatgtccccatccctcccaggtggcaggaagcttaactttggcccttcttggagttctgcactgacctgttagtaccatgccaaaattctggtcattgcttatctgtcacacttggctagttgccccttgactcagacagggcccaggatccatcctaaggtcttccctcaggatgcttcctgggcaataattgagtctctactggtggggatggggtgtaatctttttttctgtttgccttcctgattctctctccctgtactccaaaagtcttcctgagtatacctagcattaggttttactgttttattttcttaattgatggctagtatttaagaacattatctcccttctgtattatgtattttaaataagagtatttactgtcttgtatatacttgtattgtcttgtatatacttgtcttgtaagagcatttactgtcttgtatatctgaatgggtcacatgtagtgcaagcttcaagactggtttgattcagcggttcaacagtgtcatcaaagtactcgtttcattcttccttaatgttttgtgactgtgatatgacattgaatctgagatctattcctttatgaaggggaaatagctagcatttccaggttttatatttgcaacccacatcttccagtagagagacacaatggctttggacaacttttcagaatgttaaacaatccttctctcgtaatagcttccatcaaacctctactaacatcttattgaccttcattgcatcacataagttaaaattattctgaaatattttatatatgtactatatatatatataacatttaagatatatgaagaaaaatataatgcgatttcatagcccccttttaaacttccttagcaatgcctcctatatcccctgacaggggcaacgtttctttgtgtttatcaatattttgctttcctgtataattttaccctttatgtatacaatcctaaacaatatattttttagtgttgcatgattttagattttgtgataatgatatcatctatgtgtatttcttctgccacttgcctttttgattccacatgatttgtgagattcatccatgctggtggatgaatctatttcttaatttgtactgtgatatagtattccattgtgtgattaagccacagtttacttatctatgtgttgttgataaactgttaagtcggctctagtttgggagtgttaggagtaatgttgccaatcttctcttatacattgttgtgcctgcatggaaggggtgcccaaatgtacatacatatataagaatggcattgccgaatgaaaccatgaacagtctttaatgttactatataatgcaaaattattttccaaaatagaataatattttcaatataagtagaatataagaactcctgtttttccacatctttgccaacacttggttttgtcagcatttaaaaaagttgtcaaattggtgtgtatgaatttatactttacagttcaatttaccattttggcaaatcaattaggctgagaatatttgcatttttaattgatatttttatttcatcttttgtgaaatgtctgtttatgatttttacccattttgattttgtgttgttttcaccttcttaatggatttgtagaagttcttgtatgttctgcttactaatccagggtcagttatacatgttgcaatatcttctcccaatttgcaatgtacattttcactttttgagataaattcttttaataaactaaaaaaataaggtggtcaaattatcaaactattccttatggttgatattttgttgtcttatttttaaaattattttctactccaacctcatatatatttgtgtatgcctatgtgtgtgtgtgtatttacatatgggcttatatatttgggcaatgtggtactgatatatttgggcagtgtggtactgacacaaagacagaccaatgagacacaatggaaagcccagaaatgaatccatgcatatatgtaaatttggtagatgacattacagataactgggaaaagataagtggaaacaattaatttctatattcaaaaaatagatggaataagaccccctccttcataacaggtcaattaaagacatatatgtatatgtttatgtgtatatatatatatatatatatatatatatatatatatatacacacacacatatgtttatgtgtatatatatatatatatatatacacacacacacacacacacacacatttctacatatgtagctgtatatacacgaatatacacatatatgtctttaacttaacgtgaaggaggagtcttatttcatctgtgttttaatatggctaataattgtctcagcatcatttacgtttcccaataatctgtaatggtatctctgtcatctaccaaatttccccatatgcctggatttatttctgggctgtctgtggtgtgcctttggtctgttgtctttgagtcagtaccatattgccactagcttctatacatttacaatgagctttaagtctggttacacaagtctcctcccacattctcacgcctagaccttattcttcaggaatgtcttggtcattcttggccttttgcatttctacagaaattttataataatcttggagatttttaatatttttatgaaatttcattaaatttatagttttggggaagagttggtatctttgtaacattataatgttgagtctttctatctatatttctatccaaatctacttatttagatcttcactgtctttcgtcactataataaatggtatctttcagtatcatgtattctcattattgctaggcattctttttttttttttttgagatggagtctcgctctgtcatcccaggctggagtgcagtggcgcgatctcggctcactgcaagctccgcctcccgggttcacgccattctcctgcctcagcctcccgagtagctgggactacaggggcccgccaccatgcccagctaattttttgtatttttagtagagacggggtttcaccgtgttagacaggatggtctcaatctcctgacctggtgatccgcccatctcggcctcccaaagtactgggattataggctgctaggcattcttttttttaatggatttcagtgtttaaagaattcaagaagagcctttgatatctggttacctctactttttgaggaaaccaaatccctgatgcagagaatgaaagagtttgtctatctgcttgaacggagaagaaaagaaaaataaacagaaaatgttgcaatttgaaagtaattttagtaaatttgcctgccacacctacataatcttatttaatcctcaccacaacgttcgaagttaggtgttatttgtcctattttcatgacaagggaaaccaaggtttaggaaagccaagtaatttactcaaagtcacagagcgaatgtgtttatggtaaagccaggatttaaaatcaggtggatttcacaccaaaatagttctgttcatcgcgtagtactttccctcgggcaagaagaatgttcacaattttctaagcatttgagtacaatgaccggaatggataatcctttctgtagacaattatgtggctctgtctcccctcactaaggtcagcagacatttgatacaactttatccatctcttcttgtcactgttgctggctgagggggccacttggctcccagggaggagattttgcacacctgaggaaacagacagcagacagcaccaacatgcttcccctagactgcatttggacacacacagccaggcaggggaactgaaattgtagagcagcagtctgtgtggagtcattttaatgttttcttaaacagtcagtgatggaaaactttgataacaactcaagtgaaagcttatggctgcgaaaagcctcctctgtggatctgactggaaaggattctctgctgaatatggcttagatgcctgagccccgtgttctttggtaagaaaattaccgcaagtcattcgccatctgtgatcctcaggggtggaatcttttgctggaagacacagttattatcaatcaacctgtgctagccaacaggcctccagagcttcgcgggtggggggaatgttgttacagaagaaacgggaaagaggagcctttgtgggaaagggtggttagtattcttgatggcttgtcagaggcagtagtggccataatcacgtgagtgcagcacttgagctggttcagagctgcagtgcctggagtcgtgtctgccggcagctgccggaggcggaagtggcgtccatggtagccacttcgtcaggagggctcctcaggttttagagccagagcacaactgtgactcctataccaggcacactggacctcaggagccttgctggagtctcctcagaattcacaaaagaaatatgaagaattaggaagaaagttaaaacttagtagagatcctctttatagatgcaacttgagaaacagcgcacagatataggttactcgactggaggagttctgtgtttgtgttttcctattataaagagttcgggagaaagtggggtgcttgctaaccattggttctctctcctgtctctctcctgtcttttctctcatcttgccctttctcttttgccattgccccttttctcatttttcgttctcttatttgttctttccttctccctccacttctccttcgccttttctctcttgcttctttctctgcttcacttcattctccctgttctgtcctctcttccagtcgcccttttttccaacccaccctttgctatgttctgaattagtgattgcctaagtggaaagatggagacagtttcagaaatcctatttattttagttcatcagttgttactgcttactttttgtttgaatatatttggggtatattctcaaaaatatgttgataatggagtacagaaattctggtgactgttactctccaatgtctctcttttcttcctagaactaactactagtcctttccagttcgggtagatggattatatttcttgcatagtactttcagcatttatcatttttggtaaatgaatacctaatgtgccgctagggaagctaaattcatacctatttcagctggggtgagcactgtgaccttctgttacacatacctattgctgccaccagagacagaagattgagttggatgcactatgggtagagacaagggctggtgctacttacttatcagaaaggattcttgtaagaattaaatgaaataatgggcatagaatttagaattaaataatgttatgtgcatggtatgctacaaagatttggattcagacctctttacaaatctcagattcgtcatttactagcatgcaaacttgggcaagtcactttattctacttgaaccttttcttttctataaaatgaggtcaataaataatattcatttacaaattgatcatcaaggcaaatgagataatacatgaaatctcctaaaatagagtagatgctcactgaatatcaccttacttccctccacccaactatgcatttatttatctgtcaaacatttatattatgctcactttatgccatgcactgttctaagagctttataaatttaactcttcaatatcatcatagtcttttgagtacttactattactatctcgttttgcagattggtaagctgaagcaaaggaggtttaataacttgtttaaagcctcatggatagtaagtagcagagccactaactgatatttttgtgccgacaccttaattcaagcttttttctcctttaactgaagatattattgccctgagatattaccttgaaatcgatatagatttttttcttgagtttgcaaattttctctcttagaaggcctgaggaaaaaataacattaaacaaatgcacacttaattatgagttcattttctgtgttaatgtagtaaagaggtgaatgaatgtcataaaatatactctcatttggttccaccctgagagagccgttggattgcagccccagtgcttttcagcagggaagctggccagagatgcctgcagcctgctggggagtgtgtgggtagctcctccagcagtgtgcctgcactcctcatctgcacagagcatgcacagtgttcaaaggcacacagatggggactcaagtggggccaagatcactgggaagagtgtcggaaaatgaaacctggccaacagacagcacccttctgtttaatcagaatgctggagccaggtccagagaataatgactacaaactggctgtgccttgggcctattcagcatcttgttctcattttcaagtgtttggtccttgggaaggtctcaaagttcactttgctactcgattatgctgcctattgaggaattttcaaggcaaagtgaattcatgtgacctggattcattattatttaagattattaacacatttttagaccgaattggcagtaaggaaagggaggaaggaaacatctattgaggtcataccaggtgctgggtgctgtagtgggcacttctatgcatgttagctcaactgacgataccagagaagtggaaattacttcagattgtcatgaaaaagacaaatggagaaggtgggatgcatgaaaaatagacttttaaaattcctaaatcaatgccctcaagtcatctaaaatgattagaaacagtctatagttgtcttttatgaggagacaagaattatatgtgttccttgtttttttctccttctgcttgctgaagagttctggtttcacttgtctagtccttttccttccctttgtcctgccttgagagactggttatattaagcttttgtgaggaatttcaggtgagagggaatggaggaagaaaaaagagacttagggacacatattcatacccatgtgtgtatgtgtatttatgtgatatatgtataattttatatatgtgataaatacatacacattacaaatgcaattatactatacttaatctttcatatgttttaaatccttcaagtttattatgaacatctccccatgtcaacacatttaaaaccacagtatcattattaatattgcctaaaactctatactcagtatatgtcaatacttgattattggatatttaggtagtttccagttttagttttatcaatagtgcagcagtgacatctgaacaaagtcatttaaaatggcaccagttactgtttctcagggatcagctttattgtgatttttcttaaattagaggaatcgcctatatgttcaaactaattttttagattactagaaatattcttgtaacaatgtcttatggagaacccactgtataaaacccatagaagtgtacttccccagccagatgcagtggctcacacttgtaatcccagcactttgggaggccaaggcaggtggatcacttgaggtcaggagttccagaccagcctggccaacatggtgacatcccatctctactaaaaaaaaaaaaaaattcaaaaattagttgggcctggtggcacacacctgtaatcccagctacttgggaggctgaggcagaagaattgcttgagcccgggaggtggaggttgcagtaagctgagatcaagatcacgccactgcactccagcctgggcgacagagctagactgcctcaaaaagaaaaaaaaaagtggtactttcctccatgggttgcctcctgcccctgaacgcccccatccctcagtgacctctgagcttccacagtacccaagagtgctccggaacaatggtaagaccactgagctaggaactagctttgttttgtttgtttgtttgtttctatattattatttgttgatgttacagagtatagaaaattggctttttttctttaaaagaagaaactatgttttctttttttaaaacaactcacattgagctttgctatactactttgttacctgaattggtaatggttttctttttttctatgttataatagaatctttatatttaaataaacttaaatactttcaggcgctgtggtctagagctcactgaaagtgttatgtgtacatgagcaggaccctcaagagccaacctgtgttttttgtctcattaacttggaggaaggcatgaggggtcagggcctacaatatcacttggaaacaaggaatataaagaaaatctggcctgtttggtaaaactgtgcttctccatgtcttgcctcttttgatctcttgcctaagttttgttttgaaaggttaacactattcatcttgtcatgactttaaataatcagattacttttctatgcaacaatgctctgtttttcctaagtttcctatttcttcagtgattctggggtgggatggagagtgaatagaaatacaggcatcaactttagtgttttcattgcaattgttttatttgtgcccctcaagttgaacctctctgaatgagtgtgatcatatatctcacatacttggtgttttttcttcagatgttgggattcaaattgtttggaaatttcacatgttgtaaacctaacttagtgacatcatgtgaccatgtataagggaacctttatcattatgttattaggaacctgatctctttgtcattcatctattttttgccctggcttgttgggattggatcaaaccaatggaaatgccggagaactgagttagaaatgcataggatgttaaaagaacagaaatttatgctttaaagtattactactattagatttgtaagtttaattttttttcctctggtgttaaataaattgctcaaagatctctgacaccagaaggaaattagaaggtaaatgtatgttgataacacagaaggatcagagagggaaatccactagcaaataaaagaaaataggaagagtaagtaagtacatcattgtaagcaaaaactgacaaaaaggaaagtttgaagccagaaacagtcaaaaagttcttctaaaagtaagaaaatgtttatgaggggcacattggacatattttctattctattggggtctggagagataggcaagtatgaatgaacaggtggaatttagttgttttccaaaacttgaacaaacaagaaagggtattttggggtccaattagcaacattaagataaattttatatactggcttcctgggatttgtgccttcaatttacaagttttgctgataaagaagaaaatcaattttattttattctatttcccagggagatagcaaaatgcttgaggattttttttgcaagagactttttaattaggactattatagaaatgagttaaacagccaaatatcaaacctgaaacgatctcctgaggcaagagtgtacatgatcattaggtttggaggcaaactattgttaaggattctcatataaggtatcttagtctccacaagcaaaggtgatcaaatccagttgaacttgcttcacaccatatgccattgtccttcagtcccccaagcagacaaatcaagcttgattacatatgagataccaaggcatccagagaaatgatagtgggtgtaagtcatgccacaatagggtgtggataggtgtttctggatacggagatagatggccacacaatcctgctgccttcacccagccagctctcagcttaagagaggtaggaaatgaggcaaggaaaggaagatctgagcccttcctggagctcagctgcatcctgaggcagatgtttaatggactagaaatgatcacatagagaattccttgtgtctaacctagaactaaagcctgtgagaacacactcttaatttatttccatactgaagccctaaccagaagcttagatctttgcattccaacataagaaagagacaggggttaccaaactaatctgtgagaagtaaaagaatgtgtgaaaaaaataacatgagccccagagtctagagcagaagtggataagatgaccttacctatagtcttctaagctgagacaacaggaggccaggcccctggtcgggaggatggtgtgtgtgtgtgtgtgtgtgtgtgtacatgtgtgtgtaatgtgacttacccattaggcaccataggtgcggtgccttggggccgtggcagttttagggctccacaaaaatgttttaatcttttttaaaatcaagaataaaaaatgaatctaataaaaataatgaatatttattaatgaattcagcatagattatataaacttgccttatgccaatgtagtcctaaaatatgttttcatatttttttctatagaggaaggtactcatgagggcagaagtgactagggccaaaaaagtcattgtgcagctctgacagattgaatgaccatgagagagacacagaatgacaacctcctgatagatagatgcagagagattggcagagaggaacagagacagaacagcgagaaacagatacaggaagatacatgcagagtgagaaacagggacagagagacagagggagatgaaaacagacacacatgcccacacacaaagagagaaacaggcagacacacacccccgcgccccctcccccatctggacccgccccaccaacatcctgacagatacaggaaggcagagagaatgagacagatggagacacaggaaagacatgcagaactagactgacagccataggctaagatgtcacagggaacattctactggaaggaggcagccatcagcttggtcttacttgtttcagcctcccaggatcaaatatgtctgaagagtaacaggcctttccatccactctttatttttagccacagaggaaacagtaagagagaagagggcagatgcttctgtttaccaggattttaattggctacctttggagcctgtgggcctaagctatgactattgtctagaagctttgggagaaaggtaaaaccacagtgtaaaatcacagtggaagcttggagctgaaatgattattgtatcttctctaaccttatacccagtaatgatgtgtttgtaaggccagtggtccaattttttctgcagagtgaacaaaccagtggctcccccactacctccatagagatgttttaacacagacacattctaaacagcaaactacatcggacgccagtctcctataaatgctagagagtaggcctcctcctggcctttatttttccatgttcctggatatatgagagtctcaagagggaggtttgatgccaacccctgcccttgaccttgggcaaccttcttcccctttgtgggtggaatgaggtgccatgacttgttgcttttattcacaaagtgcctcacttgtttatatgaagccaccggcctcatggccatgcctcagccaaaccaactgggaattatgaagattggtttgaggcaggaagtgtcctggctctagacctaggacagctgctttgattgtgagtgcaccaggaaagtgggacaattgaagcatgaggaccttgtcatttaattgaaagtcacagagttccttttcacctgtgtcatctctggaaaactggagagagatgatctatacaagacccagtaagatacacaccatttaaaatgccctacaagaagtcacagtgaaatgaaataatttacaccaaaaggtgtatgttcttcaatcttctctgaattctggacttctgatcttgccagagatagttgttagaagaaattgatgataacttttttaaaaagaaacaagttttaaaactagaactagctcagccttcccttcattcaaggttggataagcagtagtcagtgagaacttgggaaaatagtcttgaagaggaactgtgttcacatgtccttagtcatgaaaatcatttttaggtgaagtgatttctcattttgcacaaatgattatagagtgtgtctgtttgtgaacttggtcataattgctgcccaacatcattatggcgataatttgtttagctaagagaataagagcagttgaagttatttttaagtttgcattttgtcagttgtaggttttcttttttcttcctttttttttttttttttgcatttgatggcaccagctgagtgtgggatggtgcacaaatcccctcagaaatggagttatttggtcacagtaaactgaagcctctccccaaccgccaagataacagcaattactttggattcattttagtaggtgtgaaaagctcatctgtttaaaagatgagtactctggtttatataggatcctctggtagcagcaggttaattaaagaatgattctatcatccctagcctaaatcgcaggcattataaaagccagcctgctttatgactgtcatgtgagaaatgtgcacactgataccccagaatttgagcattgttaaaagttagtccattgggtgtgtttgttcttcacattatccagagcatctgccagtttcttctttcttgattatatgcacctttgcaaacaatagtacagttagcaacactcttctaagtgtgccacatttaatttggggtgagaatacagctttaattccattttacagatgaagaaatggaggcacaaagttgttaagtacctttgtccaaggtcctagagtttgtgagcagcagaaggggtttagcaatcagcctgccttgggagccatgtgcttattacctacaattcactgcccaactgagaagtagcatgggagatcacctctcccactcatctttgagatgctgattcattatttgactaagaggccagactcttctgcttaccaggattttaattggctacctttggagcctgtgggcctaaggtatgactgttgtctagaagctttgggagaaaggtgaaatcactgtaaaatcacagcggaagcttggtgctgaaatgattattgtatcttctccaaccttatacccagtaacgatgtgtttgtaagtccaattttgtgtttgtggtccaattttttcctgcagagtgaaaaaaataatggctcccccaccaccttgatatggatgttttaacactacacattctagacagcaaactacatcagagaccagtctcctcatccctggaggcatcacactgtgtgctgggctctggacaaagtaactagaagtataagttctaagcagtcctcaccactaagtaacttgtggtataagagagggaatggcacacataattgtcaagtcaacccttactgcaaagaagttcagatgggtggtgcaagcagtaactgctgtggaagctcagatgaggaagaaaacaggtctggctgaatggtatgggtctccaagaagagggcaggatgtgtgcttgtctgagtttggggataagattcaattttattctaaaaaaaattgcacttggatgaatagagagaagaacatgccatgtgcagagatgtgagcaggactctgtgaatgtaaaacacaggtgatggtcagagtcagatgggagagctctattttgggagtcctggatgagaggctgaaaagatacccaccgacccatgctctattatagcgagcagaaaaatgaacacattgtggtttgctcatttcatatatgaaagtgtggggctcaaaaatctgattactgtgtatgtcacgtagaaccacacttccccctccaaagtacgtctcatgccattgtatattcacatcttgtctaagaagaaactgtatctctaagtgccataaactccaataaaagcaggtttgttctttcctcccacttgtgttcctgaaacctatgtttataggaccttatgttacttacactttggtgtgttacctttaatctcaacctctatttgctacaaacaccactgaaaggtgacagtttcatgtgggataaactctattgatctctgtctgtaaggcaagatgtttttctcaagcatttttgggcacattttctctgagaggtagcatagggcagtggtcatgagcatagatggaagtcagactgtctgggttctgatcccagccctggcacttattgctaggcaacctatggtatgtacttaacttctctgtgcttccgattactcatgtttttaaagattaaattcaggcaccatgctttaagaagcacctggcacatagtatggaatagttagcttacatcatgggttcccagcaggggtgatagcaccctcaagggggcaaaaagtttaaattcaggaatggtttcattaggaaaacatttgcttagtgaggcttcttgtggggctgaggggtaagagggatgagtggagaggaaaaaagtggtccagaaacccctgggttgcaccaaccccattaagttggacctgatgaagcattgatagaaggaatcccaaaagaggtttacatgttgtacttggaggcccgtaaccaatagagggtttaatcaacaggctttttacctagggcctgatgtaggctccgccttaaggccatcacattcactgcttggttatgtgcacagggagggaaccagtggaagcccaaccccccttccacagggttcttgaagctagtcatgaagggaacagagggaggagggaatgagttgctttgcctgccttgcctgaggtggaaatggctgtgatagatgtggtgtgacctgggcagagtgaatagtaaaagttcacatctacccaggattttctgtttttcagagtagtttcacactcattatctcacaagcactctttctcttttgaaatagtttttagttacacatgtagtaaagaaatgcattcctttgtaagaaattgaagtattactgataaaagtaaaaatgccccatgagccacatctggttccagttccctgctccctccacaggattaacccctgttagcactgtgtgtgtccagcacttgtttctattcatttatgctcaggtaagactattttaaaaagtacactattgctgtgtagatcctttaacactaaggatatcaaactatatgtaattttctacttcaagctttttttaaaatcataatatgtcttggagatggttccataataaaacattcagatctacctcactcctttcaatgactgcatgcccatggaatgaatacctcattatttatttagccatcttactttctggtaaatactgatattgtttctgttttgatttttttaaccacagctacgaatgccacctctttgggtatgtgggtacgtgtctacagctgctcattgaggcagatattatctttacagcaaaggagactgaggctcagagaggtgacacaggcagtgaatagcatgtccaggaccagaagccaggtcttttttgttttaaatccaggtttgatggattttcttccctcattccacagctacctcccacccttatctcatactgggacatttgcatttggcaactgatttcctagcagtaacatccctggggtggccctacatgtcgctgctccttttctcactgtagatgatggatcagctgctgtgtgtccctgaaggaaggcagctttcaggaggtggacagctgtgtgtgaataaaacaggggaggaggggatccacacatacctgtcctgacctatttaccgagcgagctgttgagccaaagcagcaccgtgttatctaaccacagctaaaatttgaaaggtccaactgagaaatgtcaggaggaagtaacacttgaattattaaggaagtaggtactaaaggagatggagaagaataacctatgaaaccggcttgttttgagcaggaaaggaggagatggatgttctaagtgaccgccataacttgaaaataaagtggttcctggggcctactaaatgtttaaatttcagagaatccaagcttctttttgatgagccttcttcagtattttacaacggcatatcgaaagggtttcttaattaaaatccccagcacgttggaggggcgggctgattgaggctgcagtgcctgcaggcagggtgcccacctccatcagccacgccagccgaaggggcatcctgcagctcctctgtcagagggattcctgccggagcacctcctggcagagagcatgaggcccggccaattcaatgtggcctcgctgccccagcccagccgggacactccccaggacccaattagcagattggaaatcgcatccaagtatgttacaatcaccaagttaaagaggaataacagacatgaaagaatcaagtgggaaaagaacattttggatcccgaaagagcaggctgcttgtcggagttctaacgaaccgaaacaaaataagtagtagctccttaagcctcttttctaacactgctgggattggttagtgtagagaaaagcattgaaattgcaaaagaaaaaaatgcttattgttcctatgttcaatttgttatttaatataacttgttttttaggaatttaataaaaaaaaagggagggcatcattaattttacattctgcaagaaaatgaaaaatgatctgctgattagtgatgtgcaatttgttccttgaacatctccagtaatgtgtgaatgtcacattacataacacttataatgattaaaccagaagatgaaataagataggatagatcttgtgttctttccttgactggtggacaactcatctcattaatctctctttggcttgcagccttaaattgaataagccgtgttactgggggagatttatggccaaaagacttagcagcctcactgaggaaatcttatagcaccattttgagagctctccaagataattcttgggatttgtattaattgtagcttgtcataaaacattgcccaaaccagaaatgagcaatgaaccttctcaggaacttaatattacagcaacattgaaaatatgcacttcttgatgttccatctcatgagatgttaaaacattctgagtcccaatttaaaattattatattagaaatggtagcttcagtagagtgggaaatgatagcttcagtagagtgggaaatgatacactgatacacctgggcactgaggaatgtttgtagaaaaccagtgggctttcaatatcacaagggcagtccttcgcagagcagtgagcaggatgtccctatgaaatgtttgtagaaagaatgaaccaactggtaaccatgagtcctctttttaaaatataagttctctttgtggttgaatttctgacacttggtgtataagtaccagtaagtaagattggcttacttgttgcaatttttaaaggaagtgccttgccacagccagaaccagtggcctggaactaaagttgaaaagaggttagatttaataagtcatccaatatatacaagatttccctttagcagtcatcagtaagccttgcttgatgacttattccatttggggtgttcacttcctctcaccgtagcatgtttattactggactctgggctccttgaatgcgattctgtgcccttttctgtagccccacatgtcagttatgcacaggacacactaaatgctcaacaaacactttctgatatataaaaccaaaattattgtttatatgaagtcaaaatctacctccttgaacttccatttggtggacctagttctatcttctgcacaaaaataaacatgtcaactccctcttccctgtgagtattttgaggcttaatcactcctcaagtcttctctgtgccagattaatccctagttccctaaattaattattttcttaagctgccatgtcaatcattttgtgcttcctggtcaactaaaacctcaggtttttcttaagtaatataaaggaaacatttcccctcatcttttattggagtcatgttttccttttaatctttttaactgaatcctacttaccattttcaattttaatgatactgcttaaccaatctttctaccttactgagagtttttcaaatgctgattttgccaataatgctgttaccatggtgttgtatcttttgcagatttgatcaacagtactggcatcagaaaaacacagatgctttggtaggtgtcatcagggtcctcatctctccctatgctggcattgatctatcaccttatgtgatctttagccccatacaaattctcatatggcattagaagtaactttagaaaatattaaatccatttgtcctctctattgatactatacatgaggaaactgagtcccaaagagcccatggccacattactggttaatagaaacactcatattagaactaaggtccaagtgacaccaaaggcaggtgtcctttcctgtttatcatagctgccagtctttatattattcacaaggtcaatgcaagaaacatttaaacatctcgttggaatcccaacatattgtgataggtttcctattacgtgagggttatgtaccactgtcaattagaagataaagcaaagtggtggccttttttatctcttattctaagatcttcagtaaaattccttctgtttctaaatataaagctttaaaacaggctatattgatgttgcgaaagaactggtacattataagtagaagtgtgtgtgtatgtgtgtgagggaggggtatacacatatgcacgtgctttatatcataattaaagagtggaagaaacaggattctttactggtcaatgaaaacttttcagaggaaggcaaactggtcatttatacaaaaccgtttgtggagcatgtagacttcctttgcactcactaagaaagcactctttttaacgagggactatacatttgttcaatgaaaagaaaatagctctttgtaccttgctaacggaattgctaactattcttcagataggagtctcattgttcccactattcagtatttaaatacacataatgtcatgtctttactgccattagtcagtattttcaaagagctctttttattaaatttctgaaacccaggaccaaagaacactttctcttaggtatatattatttgttagaatggaaacaatcaatacattttcagagtcaaaaagcactgggaaacagtttcttttttggtctgagcatattttttattaaaaaaaaaacctttgaaatattttgttttatcagaattgtttgtagggaaaatgtaaacctcactattgtttaactgcagtccaaagaggactatcatattgcacttctaatcaaaaaataaattgaacatagtggtaggcttacagaaagagagagaattagatttgattagattagctttaacctgcccggaataaaactgtctgcctttcctgttatttgtcagtgtttatagcgggtttcatctacaatgctttcactattatttctgggcggtaaaaggcagtcaagcagaaaagacactcataaatgtcagaaaagagtaagtttttttttgcatttcaagggctttgaaggtcaagttcaacccacttaacggaagcagagtgatgggtatgtggtagcatgttgttagctgctgcgtttaggcatataatttatgtgaagttaatgcacttgtccatcactctaagaaagcaaaaggtcctgggaagattctatttattttattcattttgttcaacttttagaaggtaaaataattcaaatttccataatttgtgatggaaaagtcacatgtttaacttgttaacagctgagcagggtagagcactgtaatacttccctgactcttcctgttgtaatttgtttcttcttctgagcagctgccccactccatgctgggcaaaggaagagctctgttaagcatttttgcaaaccagtgggcattttttttttcctctggaagcctttattgagatgttttctttttctttttctctatgaggctttattttttcccaccagggagcctgagcaattatagtttaaagctaccgaagataggtatgttctttgatatcaaagagcttcttgaagatttttcaaactaaagagacccaaaggttgtattttaaggtgttactagcatggccctttgtagttgaaaactctcagaatgtctaccaagtgtattatgctttgtttggaaatgttggacctcggtactattgcatttggtaaaaggcagggtgttagaatctgtgtgtatgtgtgttcctactgctgctcagtggagtctctgtagttgcaaattgtttccctagtgatgtaggatgactagagagagaatagggagtaaggaataaaatcgacatttattgagcactcactatgtgctagaggcataatgtatgtaggggatagaaaatcttatctctattcttttggttttgttcccaccttgaattgaattgacatagacagatcaatgggagaaaaatgtatttaatacaaattttaggtggcacaggatccttcatgaggaaatgaagacccaaagacacagttattgttgaagacttacatactgaactggaaaaggaatagtgagctgtgaaaaagaaaataattatgtggagagactagaagataagacttattttaacaaggttagtacagaattttcttagtctcagcttcctgtccgtgatgataagaatgttgctttctttctactatagggagggatctttcacatgaaatccataggggaatttcacctcctgcttttgggaaacagatggagggtcggagtgatcttgcacctcctattttttaagtgcttttagctcaaaataattatgccaaagtagcatatgtgggggtggtgtgttctgaacgtttttatgcatcttatttctttcaatcctcatttactctgagaaatggcaggttactatcctcatgttcctgattagagaatcagaaagggaaagtttacttgcctttgagtcaaaactggtttctttaacatccatggttgcctcactagaatagtctccagaggggaggaagtggaggaaaaagaatgaaaactaggaaagcaaagcaaacttcttgggaagtgtgtgtgtctgtgtgaaaatacatttttgtgcaatgaaatggtttgagtactgtagctctgagttctttcgtagctttgagaacttttaccactaaatggtagaaattcagttgttctcttttctttctaaggaaatgtctttgggtcaccccattgaggtgctaacttgctgcctctttcctggacttcttttctcccatcgacccttctcttcttctattcgtcaattctcaatctgcaaattcctgttgcctttcatatgtagaaaattcaattctctctttgtttttactgtccatttccagaccatgctttatcttagaaaccccaaatgtccatagcagtgttttactaaacgatgaaccatgaatgtgtatttaaccaatgagtgttgagtgccacctgtatatcagatattatactgggatgacatagtggcaaccaaaacagacacagttccagcccttgtagaatttcaactctgatgagaaagaaaggcattgtgttattttataataaatatattctagtttttcccctttatactttctgctgccatcaactttattattttgggagaaaagattaaatttcaaccctatatcttgtatggtgcagttgccccataaatgtgtgttgattggtgaaaaacatcaaatctctttagccctcatattttcttgtcacaaaagtattactaatattttgtattaaatggtcattgaagaaaatcatcatgtgtagttgagcatcagcattggtcagcatctgtatagaacttgaaagcctataaagggaggacttttatggactttatcagaagcaagcttcataaatctgtggagaaggggctcttctctccattttgcagttgagaaatcagtagataggaactaatttgtccaaggtggagatgagaatctcatctctcctgtctctaaatcatcttttcttttgactatattgtctcttgacaataatttaaaagtatctcaatatccacagcaataattattttttgcctgaaaattacaggagcagattatttcattcatttaatgtattgattcaccaacatctcttgcacatctaatatgtgccaaataataagtttccagagccaggggtatgttgtccttttccttaaggcattgtattctaacttattggggtagacagaaatatgactaaataaatacaggatccttatttaggatatagaaggacacatgacataagtatagaataagatatccttgtggtataatggaaagatcattagctttttaggtgcgcctggtttgaatcttgacatcaccagttactagctgttaatttgagcaaatcattcatctttttaatgaacagttgtctcaactatgaagtgggggataaaggtatttacatacattgtagttgtaaagatcagaggtgatatgtgtacgagacctagcatgatttcagaaacatagtagatgctcaattaatggtactgcaattttatcatgtctattatacagatatataatttgtactgtatctgtttgttttttacctacatatctaaattttcttctctatctatctgtctattcctcaagaatcaagagactaacttcccgaagagacagaagaacagctaggagaagtatcagagaagtaaagtttctagggttgtacaaaaacttaagttttgtacagaaaaaaaaactatactaatatatgtggcaattgaaaagtatggaatttatcaagaaccacaaaaagcttaccatggttaaagtatagggtacaagtttgggaggctgagagatgaggctggaggaacagtcagaggtcagattatgaaggggcttttataacatgttaagacacttggactttatcttgccatatagacaactccctctcacctaagtaggaaatgacaagctggcaattaaagtgcttcaaataacgtatcttagtatgtggaatccttaattgtgtagaaagaggagaaaatctatctaaaaacttacccaagaaaccaacacatggtatatactgaacaagaatccttacgattgatgggcaaaggagaggtgagatttctagtgaaatataaaattagaaagtatcataaaccaaatcccagaagcagcatgcagggctgaaatgttataggccaaagcaccctcgggcaaattttgtccattacatggtaagttctaaagcagcagggacaaggctcagagtaactaaacccggatggaacacctgcagtttttccctgaacgtcagcataaatatttgacatgtcttcctttctgtgaaggggccctgtcccagtgggagtggtgtctggtatcccttagcagaagtatttgttttcttaagcttttctttatgtcctagaggtggattctaaaagtccctaacgtattttgattttgaattttcacaaaagtatttttttctttcacagtaattcagtataaaaggcaataaaagtgatgtatccagaaatattcaggacctgctatcagcaccacatgggaataaactatcttgccacttgcacatcccatgggaaaaaagaatcacaatccacatataggaaatattgcatgtgtttgcctccgttttgcttgtattgtctgctctgctgaaaggcagattttttgcagataaaagctgccctgcgttggtgaactgctcacctattttactcaggaagaaaaggctttgtgaaaatcaggagcaaagcctgatttgcagaataccatctaaaaataaaatgcataaaaatgtcaaaatatgctaagaatacagggccaccttcatgctttgaaaaattacctagcaaattcagcaaatgctgtttttaagtgaatgtaaattatgtgttttcgaagtttcatcttgtgaattggtggctaggtgctgaaggagacatgagggtgtggaggcggcctttctcttcttgctgcactagggcaatagatctgtggttaaagcagatgaactgggaagctcttgatcaggcatacgaaatacccagattcttgtatattttctagtttgtgtgcacaaggcttctggcttggctgcttttgccagtggggaagcattagtgaacaaaacagatacagcttccagttttcaagagctcacagtctagcaagtcactgcaactttaaaaaggggatgtacatgtgtggtttaaagtatggtgggtaaagcctttaggggttgtaaaagttcagtcactggggcctaattctgcaaaagagaaattcttcccaaagctgggatacattgagtgtcttgggcaccagagcagaagttttagttaaaatattaagatccagcacaaagttacctcccaccagttgaatctgtttttgaaatttggaaaaatggcctctgtttctccacaactatgtattggtaattcttccctggggactaacttcatatatatattttcacaataatgcatactgaataaatctgaatattttgcttatggaatcaacaaataatctccagagaaagtttcattatgcagtcatatataagatatgaaacagattttttccctttattttaagaaatatgcatagcataaaaattctcaggctctctttgctttatgtagcaccatttctgataagataccaggtttcaacaaactggctcagtggacatttaaaattcccattgtgagtgccagggcttagtggaagatgtttgaccatgtgcgctaacctatcagtgttcatctacatattgggagactgaacctgatctattctgcacaactggacagaaaaatatggaggtgggttctcagccaagggttaaaaaaggaagtaatctcttttgctgtaaactttttctcagcaggtgtaaaatagctgcaatcaggtaggctttggtaagtggcagctgctatctgcccaattgaaagatcagaaattctcaccctatttctgtttcaattatgtagacagtggctccaattttcaagtgtctaaaggcatgcctaactctgtgataagaaatggatgtgggccagagtgggagccatgtgcaaagctgtgctgcaaaccctttttctagtgataccagctctagacaatcaaggtccctcggttatcattatagagtcattaaactcaggagccagcagtgatcactaaaaaatggatgtacagatgaggaaactgaggcctagagaggttaataatctgacttgtggtcagacagcttgtagacttatctagatatagcctctgtccttaagctgctgcctaaggacagctaagtgctaagtttattgctaagtggtaaactgattagtatcacaaccacctgcaacattatgttgagaggattctgaagttgcatcctgattcaggtggaaatagtgctatgattgattagcaatgtctgcctggggagaaggtgggatatggtttgctgtgtatttgctgaatttggttgaatgatgatggctgctttgtaatcacgattgctacaggatgtgaagtgtgcttcagtcagaacaaagcgctctgaatcttcttggaggggcaggacggtttcacagaggagacaacatttgaatttgatcttgaaggacaagtagaagttttcctgagagagaaagaggaaggaaaggaaagaagacattgcatgaggaaagaatagcttatgtaggcaacctgatatgtggataaaaaaaggaaattgatgatcattgattgtctgctatgtaatgggcactaagctaggccttttctgtgttatctaagtatttaattttcataatgaccctttggttttacagatgaggaatcagagaaaaagaaaattaagatgtctgaggtcattcagctattaagtagagctaagattttaattcttggggcttcaaagtaactttagtggcagcaactcagaggaacagtataggtaaggaagagtggatcagagaggcagagatcattagtttggatttggactattgaacttgagttgcttctgggacatccagattgggatggctaatactgttggaaatctggcacagagtgatctggtgatggtttaaaaaaaaaatcaaaggctctttgataacagaccttgtgcattttacatctaggttcctgcctaatagtggagatgtttctgcctttgctattctagcaggggaaactatacgtaataaatgcatatgctttatattgttttagtgattcaaatgactgtcaatgcaatattaaattcagaattgataggaaaactgtcctacttagaaattcaagagttcttggcacaatactatttattatcaccatgagacctgtgctgtagcaaaactctgcttgtgtttcggtgaaagactgtttaacatgcatgtttcactctaccgaggttcaactttgacctataagaggacagtgtatattccttagagagatgctaggaggtaccacaattgatatctatgtatgagaagtgggtgggatatgcctgcatgagcaacataatctaaaccaagttcaaaaaaagaagttttttttttttccacaggtgcaatcttgacaagaagaaaaatctcaaaaaggtattttgcattggtaaattctgatgtcttgggcagctccaggactgtttgtcatgctttccttatggacttctggttatgcctccttaaggatgtgggctgagggataatcatttaaaatagtccaggcaccatttctgattctttgttccctagaatgatgatggtggtggtggtggtgaccacaacggtgacaacaatgataccaccatatttcattgatttttaaaatgtttttccacattttcagctatctaagaatacttatactcagtacttccttgcagtcactgtcagcctgcaacaaagttaaatttgtccacagaggattggcattatttcacatggtcacctggggtcactaccaacctgagaccatttaaagttatttgctgaggtgttttgtttgtttgttttcgcactgtcagtatgaacttgtatcagaaacctgcatgagtatctgcttgtggttcaagttctcagggaagattatttttcctctttctcttcttgctgtgcctttctgaatggaagctttctttctggcatattctagtgctaagggaatagctgtttggtgtttcagctttttgcagaggtctcttattagactcccatcttacttttctttcttattctatttagagtaacagtgtgactaacaatcgatggtctcttatagctgatgaactactgtaacaataaaagctaacatttacttagcactttccttttaccaggcagtgctctaagggctttttatatgcgataactcatttaaaccttcaataattatattagatgggtactcttattttccccaattttaggtaagaaaacgtatgctgtgtgcccagggttgcacatattgactcacttagtgttaccagtggagggtgtccaggttctgggcgttttgaacaaagaattgcacaaaacacacaaacaaagcaaggaaagaatgaagcaacaaaagcagagacttattgaaaacgaaagtacactccacagggtgggagtggccagagcataaggggctcaagggcctggatgcagaatcttctcaggtccaaataccccctagaggtttcccattagcctgatgtaaatgaagtggtgttcacctcatgtaaatgaagtggtggtctgcaaccagtccgattggttgcagaaagcaaccaatcagaggctgagttacaaaggtcacagtcctatgcaagttttctgcaaccaatcagaggctaaagtgatgttacaaagttacatttctatgcaaacgaagacttggcccacaatcagtctgattggttgcagacagcagttaatcagaggctgaagtgaagtttcataggtcacactcccatgcaagcatctgattggttgcaaaaagcaaccaatcagagatactttccattttcaatctgccacctagaaaaagtggggttttgcaaagggagtggtctctggtccttttgttacctagccagtggaaagttagggtttttctttcaatttagtcctaggaagtcagcgtgaaacggccttaggttccctgcctccagaccctattctcttgcctcattagtgtaacttgaccacctgagtctaccggtacacccctggtgagaatccacttttagctttgtaaagtacttggcataatgcctgatacttgctgagtacatagtgagctgttgcaagtcccttccactaaaaaataagctattgtccttatcagaagaataggatactcttttgttatctatttctcattccatgatataggattctagctttaagtgttgtcaatctcagacaagagttgattatctaaaaaatatggattcttgtaagccttttcattatgtgccatataaaaaatgttgctccaagcaggtttactagtttatcaccattcagatttacaagttctatcaggaacttcaaagcaatttcctagtaaatttcctagtaaaaagtccagtttaacaaatgtttaaatttttctcacttctctttatattttaaatttttctcacttctctttatatttcacaccctaaccctctccctcactttcccattccccaccacattcacctcaaatctacacagaaatcttaaagtgagatgaattaagaaaaaaaaagaaaattgccttttttcttttatgaaaaaacatatttttataataatctgaatctgaaatttttgaaataatttaggacttatatttagaaaaaatcatttaatccctctgtccttccttctttctctccttcattctttcatttcttccacaaatatttactgaatattttctgttaaagacattgtgcttgatactgccttatgagatatatttctcagattttgttcatgtcctgaagaaattttcaaagacaaaattaagggggaatctttctctccttccctcccttcctttctccctccactctccctcttccctctttcctccatcttctttctccatccaccccatcccaccccacccttatccatgaactagaagccaaggaggaacaaatgctttatgggggaaacactctgagcaagttatattggaacttgcagagatgaggatggtagaatacagcaagggggccaggaggagcagcatgaacaaggtcacagtaactggatagcaaaggggctttagagaaggctgagaagtccagcttgaaacatggaggacaggaaagggagagatgggagaggagacttcccttctcacttcacttgttacagagagatgcatgtgaggtgtgaggataaatgccatttaatgtaaggtcatgtagattcacagaaaaataagagattccagctgatgtcattatcatcgtagtcattttcatcattgtcgggatgcctctggcaggacttcctccctaatgacaccaggaccaccagaatttacacttatgctctgcttctgtgtcctgaacaccttggaggtacgaatggattctaagagacaaactcatctcgtttagagtgaaaagatgacaagcagaggttcgcagaagccacatacaaccaatgaagcctataaggtagctgagaattaaacaaaagcacctgttccgattaccttcattgttcctggttagttagcacctccctttcctcaacagaatgcccggcgcacaggggtgggatctgagtgagggcaacaggtggattggagaacatttcttcccataagtagtaggatttgatggaaaaacaagtaacttcagggtaataaaatgatggaaagtcctgatgggtcaggtccatatctaatcttaagaagggcagccttaggcagcatagtgggtgctagaatcattggtaccatcaagaaaagagtagtaatgtgaatttcaaagaagatcactttgggataatgaacagcatgacagaatccgggagcctaatgaagaagatgtgatatagtaaaagaaatatattgagtgtaggctttgaatagggcagaaggagtggaactagagaggcaagaggagatgtgattatggaaggtcttgtatatcataccaagggtctgcacttacactgtagagtccagagggatctaaatgtaggatagacaggatcaggtttgattttggaaagctcagtctggaggtggtgtggccaatgtttgggaagtggtaaagactctttcgggaaagacaatatcaagagcaaacatggactacttcatcaggtatcaccagcagatattaaattatcagtacaaaacccagcaattattactttcagatcggccttttttctcttactaggagaatatagtccagatagagtgtacgtgcatgaataatcatcatagtcttaacagaggatgaagtttaatgagtgttatcagttagagaattatttatataatctcagttttccagacaaagaaatagaggcatagtgagatgaagtgactgcccaaagtcatagatggagaaaatggtaaagatgacttgaactctgatattctgcctctagagcctgtgttctagtgtgtgaattaactaagttgttaattgttattcatactaatgggaacattctcatataactggttcagaaattttaaaaactggtaccagccttaggtagattttgtaatgcagtttgtcagtaaccaaaatacctaattcatatggaaaattaagaggctggtgtgaagcatgataattacatttactttgaaatcagcaatttgtggataaatttaattcattttgcccaactctggctttattcccggtattaaaaagacaactacagggtgcacttggttagcactcagggaaaataaagcaattattcttccacttctgctagagaacactaggtaccctttgacagtcaattgtatagactcttattgtaggcagtttgtaggaaccaacctgatggaatgggtatgtcttcctctttcagctccacaatccaatgacccttttgttcaacaaaaacacaactaaacaacaaaatgttggtagttaaaaaaaagtttaaaagtaataggacgccttcaacatggtaatctactttaagaatttagagcacatgtcagtatgtcaccttcagacatggttatagtccagtaagaattacaaatccaacaaacaaaaatcaaggcaatagagttttcatgggtaccactgtaataaattcttctgtgcaaaaagccagtcctagagaaaaattataggtagcaacattttctgaggaacttttttcccaaaggagtttttttttttggggggcggggggtgcagacattattgagaagttcaagttaacatgagcattatgactgtatcagatgacatgataagaggttacattgaactttctaacacctattcttaaattataataaaaaaactcattgagtttttaacatgcctgtacattttctcattttattcagggagtagatttaggtttttctggcctgactggatttttaaactgctacaagataacataaaaataatcatggctatattcactgagtttgtttcattttgtaaaattatgaaaaacaagtttatctcattcagtctctttagcatattgattcagtatatctccctttatagaaaagaaagaaagcaaggattttcacaagatagagctgaagactgatattgagtacatagaatgaagagcccagaaagcaacgtctctcagtgtggctggacagatagacacaaataaatttcatccaaagggttagttctgattatgagaacatgggagccttgggccttctttacttacccatacccctaacaaattagtggggtttttcctagagttcactatagtttaataagcgggatacacccagatttttgattcaacgatgaaataaaatgaatgaaggttttatttatatactctgtgctttgctacttcaactttgtgcaaatggaaagaagctttattgcattcagagagaattagatttggaacttggtcagtggcacaagatagaactataacatattgatgagacaactttttatgtgggaaaataattagcgtttgataaaatcacaaagaagcaatgggtagggactcatcaatgtgtgaagtgactgagcactgatacacataacacagttgacattgtctttaatatttattattgaataaatgacagcatgtgaacaaaagtgtatgcttttcacactagtgaatacttggtcattaaacaatagttaaataaaaaacacaactttataccattggttataatttaggaaaaagaaaacaaaaacatctgacaatagactggattaaaagttaaagattttattttgtggttaaagactacttctacagtagaaagaataaaaacatatacatattaatatagattgcaaatttgctaggtccggatctttgcacttgtgttctctcccaaaataatggattttctgtggattttattttggaataggtatttctcctatgaagtctgataaatgatattcccactctaaagagcaagcagctagaatgccatgtttttgatgcatatttttgcagcacagaggggattaaattctaaatgtctcagctgttaaaggccccttcagacttgcccaaaatgaagaacaaagaaggagaaagctttccctaaagcaattcatcagatctatttgggcacagtgacattttctcagaacttatatggataagttacactgaacagttcaagggtttgcagctgcttggaatatttaagaaaaaaatatctctagttcttatgcatttcatatggtctgaccagtgctcaacactagctaatgttcactgaggctgtaaccatcagtagttatgtcgtaatagcttttgtttctcgagagctcattatgtgcctggtactgtgttctgcattttccactcattgtatcacttaatatttatgcttctgatcttaggggaatgactgtttatattgcatatatgccatttttttgcagtatgaaaaatttgttgagccgagtgtcatacattataaactgacatgtacttactgttgtttaatctaattggtggttgttaaatctaaaggatgttctgactacttcaataaaggcagcagcaatcacttccataaataaatcattagacgtagaacacatgtgtaaacaggtagagtcttctaatttgctaagtgttgatggactcaaaacagttactagaacaagccatagatggaatacatttattgatggaataagtcaaacaacttgaaacacggcattgtggtgtcttaaatggtaattcaaataaaatgaagtgattgatacatttttacttgtttggaaagtggagaatattttagaattgcaaaacattgcacttttatatacatttatcctttcattatcctaatgtagggtagataggacagttgattgcatccaacttcatttatttggcttattatcttttgttttatgattttaactctgtctagaatcatctcctaccacttagagtctatgtattcttctgaccaaatgacttcaagttttctgaccaaattaatggcctttcaaactgttaagccctctgcctggaatgcccttcacatcttctcttggcgaggccgccgcggtcctcaggactctgttggaatatcaccaccccagacaaacattccctgaactgttcctcctatacttacccttcctctggcctcccacagcaccctgtgtatacccacattagcatcatttgacacctggtattatagtgttctatttactggccagctgcaccaagttgtgactctttggaagcatggtgtgtcttttatggttttatttcggttttttcagcacctagccaagtctacacagagtatggactcaatgagcgattgtggcttgaagatgtaaattctttagtatgtattgcatgatatacatgtgagacatgcatgtatatcatgcatattagtactttgttcacttccccacctcccacatccctatgacacacacacattctcattgcattcagcgatgtgtagccttctgtctcatccatggttttcattgtagttgctgaagcttgaggtcacgatctggtggaagtgactactagaagaaggcacatgtgcattgtattctgttgtacttgtcatctggagcacacagtgtacttgaaggtatgccttttctagtggaatttcagagtggtttcatactagcagtatgagaacactttcatgctaaacaagaagggcaaagaatcaaacccgggcaatgtaacagaaactgagctgggggcctgagctgcagaaggaacctctgtccactgcagaataccactcccagtggcacacagaggagagggtgtctggcttctgctctctggttgctcccttcaccctctctgtgctcattacttggttccctttgatagaacatgagaggcagacatgggttgccagggagcaggcttttacaactgctatttcatcctgttttgaaatttctctcaaaatggttgacttatttttctctcacgtatgcatacgtatgtgttgctgcacacaacagtggattcagaaaggctatccacatctttgtccccaaacccccagccatgcaatgcaatatagcaaccaagagaaccagagagccgtgctgagctctgaataaacaaaagcacaaatcccatctgggtctccttcaaagcaagctgctattttgcaacaagctaccaaatgacgattaagaaaaaggttcttacctgtttacttaatgggtgactggcctctttgcttttatttagccatctgttctggtctatgtccctttaaacttgtaagatccatcacttcattaaactgttaccttgacacattgcaatgttgtggacataatgattccacagaggagcaaattaaaacagtttttcatgattagaagcttaaatgaggtaaggctgtggtagttagtggtgagataaggggtgttgaggaggcagagctcaaggggctttcaggcgattggaagattaggctggcgagatggagggctggggcttttccaaattatgggaggtgagcaagaagcaagactgcctttgggtatcgctgactcctgggggctggttccattgcccatacagaggctgtgaccctggccctgggaggatacaggaactgccttcaggtttcttgacttccctaggagagtctgcgaagagcaaaaagaactaattccaccgggtagtggtaagctgaaaatgcaacaacaataaacattttggtctttcacagaaagttatgtggctttccttaagttcgaagaagaatcagggggcccagcccaactatatgaaagaatattttattgtgtctttaccctgcacttcatggcttcagcagtcctccttcttgctctagacttaccttccacctgactccttgacagttgctgaaaactagaaagtcaagggctttatctttttactatcttatgtcagttcctgctctgacaactctggtttcttctgatatgacccataatattgccgtcacatggaccccaaatctgaggaatctctgaattttccgtcagccgcttctgtcctgtcagtagcccaagttctatttctcccacctaaatcaagtttctcacatctttttccaccttgttatttcttcttcttctgccctagttttcatccctcattacctctgtcctaggcaattgggatagcctcctaactagtcactgcctacctatactctctccctgctccaaagcatcttaaacactgatgtttgattataactcataacttccccccaccccgccttttttttcttttttaaaaaaattatactttaagttctgggatacatgtgtagaatgtacaggtttgttacataggtatacatgtgccatggtggtttgctacacccgtcaactagtcacctacataaggtatttgtcctaatgctctccctctcctagccccccattccctgacaggacccggtgtgtgatgttcccctccctgtgtccatgtgttctcattgttcaactcccacttatgagtgagaacatgtggggtttggttttccgttcccatgttagtttgctgagagtgatggtttccagcttcatccatgtccctgcaaaggacatgaactcatccttttttatggctgtgtagtattccataatgtgtatgtgccacattttctttatccagtctgtcattgatgggcatttgggttggttccaagtctttgctattgtgaatggtgctgcaataaacatatgtgtgcatgtgtgtttatggcagaatgatttataatcctttggttatatacccagtaacgggattgctaggtcaaatggtatttctggttctagattcctgaggaatcaccacactgtcttccacaatggttgaactaatttacactcccaccaacagtgtaaaagcgttcctatttctgcatgtcctctccagcatctgttgtttcctgactttttaatgattaccattctaactggtgtgagatggtatctcactgtggttttgatttgcacttctctaatgaatagtgatgatgacctttttttcatatgtttgttggcttcagccaaaacagataaatagacaaatggaacagaacagaggcctcagaaataatgccacacatctacaaccatctgacctttgacaaacctgacaaaaacaaacaatggggaaaggattccctaattaacaaatggtgttgggaaaattggctacccatatgcagaaaactgaaactggaccccttccttataccttatacaaaaattaagatggattaaagacttaaacataagacctaaaaccataaaaaccctagaagaaaacctaggcagtatcattcaggacataggcatgggcaaagacttaatgactaaaacaccaaaagcaatggcaacaaaagccaaaatagacaaatgggatataattaaactaaagagcttctgcacagcaaaagaaactaccatcagagtgaataggcaacctacagaatggtagaaaatttttgcaatctatccgtttgacaaagggctaatatccagaatctatgaagaacttaaacaaatttacaaaaaaaaaataaaaataaaaaaataaacagccccatcaaaaagtaggcaaaggatatgaacagacatttctcagaagaagacatttatgtggccaactgtcccctttaacaaaacaaaatttcttttggctttccatcacctagcaaacttagtatagatgtattagcttgatatctgaggcaattcagaataaagttatcatttgtgtttctagctttttctccttcttcgtgctccagtaagacaaactactgtacgcctatgagtaactgtatgtattcttgtctgcgtgctgtttcctctctctggaaagctctgttcacacatatctgtcaattaaaacacatgcattttatcaagctcaatttcaaagacatctttgctttctctcttctcaatcggatgcagttgttcctgtttttcttccatggcagtatgtttagaggaatgttctgctgcttggcataatttttttttcctcttgttacttttttgaatcttacttttgcaaatcctatagcacaggcagagtttcctactcatacagggtgctagatacagaaacagaagaatgagtgataatgatactgtgtctacaagaatgtgaacatccattcattcatttatttattcattcatttgtttcactcaaatgttctttgaatgcctgtagtatgtaaggtaccatgttaagagcctgggatacagagatcaagatgacacagtacattccagttctctaagaactcacaaatccatgtaggaaaatcacataaataattacacagtgaaaaagtacaacaatagaagtgtctttaaattatgggaatgatgggactttacctctgttagagtggataggttgggggtcaaagcatggtggtgaggaggggattgagcaattagaaaaggtttcctgtcattggaaatgtctgattggggttttgcaaactgaataggagtgtacaaggaatatagtgagataaggaagggtggagatgcaatggaagagttcaagaaagcagctctgcttgctctcagcagcccagcacactaggacaatttggtcaccaaataattattttccatttccaggtaaaatatgctgaatgacagaatccttcgacccctatgaaagaaaaagagaagaataaaggaacctccttctgtgactgcctttggttgaaagtcattcgttcttctttttgtttttttaatgttttgtagagaaagtctgtgattgctgtgagcttcatagcagcgttccttttcctgctggttgtgcgtcttgtaaatgaagtgaatttcccattgctactaaactgctttggacaacctggtacaaagtggataccattctcctacacatacaggcggccccttcgaactcactatggatacataaatgtgaagacacaagaggtaagatcccagagggttacctagcagttggagagtatccatggtaacagcttttctttaggagccagagggcttccaactcactgaacttactctgtctgccccggagagcttgcttgggtccctgacaacatcttctgtcttattattcttagacatttactgacaaatgtctaaatctgccacccctcctacattaaatcttctgattcactggcttcatatggagtcaaggaagcaattacttgttttcctggtggtttgtggcacaacgtacatatctctccatttagaagctctgattagcagttaccagctggagaactagctggcttgatttcctgtaggtcaactggttggggagagctctttatagaacttcaaaaatgcatttatactccttaaaactctgtaatccttagacctggagctagaaaaggccaagctgattttaaaatttgcagtggctgcagagataatgggatttaaagagttttcaaatttaaaggggttaaaatcgtgtaaatcctataatcacagaagctttaaatctttgtagccaattggtagtacaggagaggatggaggtatattgacaactagaaagtgcacactatgctagcgcttttgcaagcaagcatttgtctcataaagtaaaataaaaataatgaacctcacaaaatatgtgatgtatatagaagtgcttaataaaattgttttcactattcatttctatggagttggatgaatgtgagtttaatattcagagacacaaagtccaagcctgtttgaaattgttggtaacaaaggtacaagctaccagtgtgtctacattactagggagagtcttggatcagctcccatcgaaaggtcattttgtaaagatactagagggtagagtcatgcatggaatgctactcctgtcctgagagttattcttagcattctgggaggatgctaagcttggtctacccccttttgtagtcaatctcatatctgagtcattgcttctggttaatttgattcttcgaaaattgtttctgtatctgcaggatttacaggcctttattagaattttatagttgaaaaaaagcaccattaataacacataaattcttagaatctttgatgtttatcctctaattggttttaaattaatttttttacagtgtctattgcttgaatttgttgagtgtcctaataaattgattacctatataaaaatgtatctctttgaggagagtttgtctcaccctcatcttttgttacttttatttctggctatcatttaatattctataactctactgtatggtgttaatcaattcacaagtgcctgtcacaggctgaaaatgaaacatgtgactaaaatgtctcacgaagtattctcatatgggaaatcccgtcaaatatcaaagaccctttcatttctttaaatattaatgaatttgatttcggagtgtgaaaggaaaaactgacctatggatgcagttatttaattagttctattaactgggctatctttgaaattattttgatgtagtttttaatacaatgattttacaaaagaatattgaatattattttgctcctgcaaaggttatttcttaggagaaaacatagttactggaaagaatctgggctttggaagcacacaggcatggtttgagagtcagttctaacatttaatgaacttaagcagtatatttgcttttgggtaacttccttaacctcagagccccaatttccttatttgcaaaataaggataacaacatcagcctagcaaaattattttgaggataaaataagtcgaagtatatgaggttcccagctccaaattgctattcaatgaatgaattgcttttgctttctctgtactttccagtatggcataaagtgttcagtatgaataacatcaaattatcacagtccagagtaccagaatttatatgtacattttaaagatcctggacttgggggaataaacacatgtaggggttctcaatctcattagtaatcatggttttacaaattaaaaccacaatgagaaaaatatttaaaaatcacaaagagatactaatatacatgaaacgccagattggcaaaaaattaagaagtctgacaataccaagtgttgacgaggatgtggaacaacagatactattgtatacttgtagtgggagtaaaaattgtaatacccactttggaaaaaacagctccactgttgtattgagcaaagttgaagatttacatgctgtatgcccaaccatttctagtcatggatatctacactagaggtgctcatgaacccgtgcactggaaggcatggacagaacatgtagcagcatttttcctagtagccggaacctagaatatacctaaatattgatgagtaggagaatgaattagagtcgtgccacatacatttggaataccatacagcaatggcgatgaagaaactgcaagtatatgtgaccacatggaagataaagcaaagtacacaatgtgattccgtttatgggtcacaagaagagactaaactaaataatgttgcttagggacatatacaacggtaaactaaaaaaggaaaaaaaaagcaaggaaattattattatgaaagggggtctagcggttacctctgagaggagtgggcagcttgtgatcagaatgggtttctggggatttagcaatatactatctgttgatcctgttggaggttacacagatgttcacagtccatttattaagtataaatttatggtttttggacttgtatgtctattttattaaaaaattcaaaatatattctgatcccaggaaggatgtttatttaccatttaccatggggaaggaatcatacaaaacaattcacctaattcagcagcaggaaataactaaaaagaagcaatgggatattaagctatctaaagcaaactaggaatatttgaaataggcaatttgattttctataaagactaacagacacataagcaacttatttctctagttctggtctatgcatgatagaccccatattgcatcatgaatgcaggtgatagagcagaaaattttgcatgaaagttgaaaacattagaacactcaaagggaatgacagattttctcctaaattcaagtagttctaggctaactcgggagaaaataaaaactttgtgactttttaccacccttctcaatgatttcatcctttgttctgacagtcccacccctaccaccatgtctgtgccatgctcttactcccaaatgattgtgcatttgttctcactgtaatgtcctcaggcgcaatccgttgcagaaatggttacattaaataagagacacagtatgataaagctttcaagagccaaagtaatatagctgaaatgataggtggtgagttcagtgttctaggacaaatagcttaaatagtgaccacaaaaccatgcttcagagattatcacacactaagtccctattcattctattctaattctgagaaggtcaataggcttagctgaactgagtcaggtgatcaccaagctgatctacttatttcaagatcttggcccttaaagttttctcagaagactttccccttaaatgcatatggtttctggaaattactaaacttcttagtatttttttaaatatgcaggcatgccagcagtgatttccagacctagagcatctgcaaacaccatggctgttaatgatgggtttactgcctgatgcttcagcttggccagaagttgctgtaactagtcatagattttatgagctgaaatgattacaagaaagaatgtctctttactactgtctaaagaaaagtggaatgggaggcagcagaattaggtcaaacatctagtggacactgtggagtgtagggttgcttaggagcaaaatctgattctttagttatcttttaaaaatagatgactctggtccctttggattggcacaagtgaaaatatagctggtttgtgaatctatgacagcctgccctgaaggccccacatatagtaaattatacccagtttaagctctgcttcattttatcaattaatctgttttttttaaaaaaaataatctgttcccaggggaaatacaaaaattaaaataaaaggaacacaggagagatgtggttttgcttatatttcaagctgtttatttttttccctgatgtagatccataaaaaagagcatgtgaaaactgtgatgactattataaaggggttaaatagaaagatcaaaatattcctcccactgtaataatgatgatctaaatataacagagttggtgattggctttaactctttacctttacccagtctccccttcactttctcaatgagtgtaagctaaggttcttttctatgggggaggggaagtcttgagaagcagggaagaaaaatgagtgccaactaactgggtgagtgctgaaattctgaaagtcttcgctggccacggagccccaaatttctcatcaacacgtgtttaagctgatagcaaccatgatttcaaaccaaagcttggatcaggagtgatttagattttgcaacagaccctgccctcgcctccctgctgtgtcattaccgtgtctataatgcaatcccccattttaaaaatgacaatgtggagattccacctatagcattatggcagaattactgtattatcaactggctttggatatggtaaaaagtatatgtcacccatgtatttttccagaaaaaaattaaaaacagaaacgtgcttcacaatatcctaaaaccctattttccccttgaaacaaatgctatttattttaaattattaattatagcagacagaggaggtataaaggactaaggtagtccagggcttggttcaaggtaatcttgctttctcctgttgagatcatggcagatttttgggaaaaaggagaaaacgaacttcaagctaggttctatttgtagttgcctatgagggactcagtcattgtgttgtcttttttgttgtgtgacctggtgtgaagacattgctcagagcaagcagcctgcagtttatttgcatttactgctagatgaaaggatccagcttgggtgatcaataggatgccaaggccagatcttattggtaatcagtgagggtgacagatgtcttccttagacctgataggatcttccccttaagatgctggggctacagaggatttctggtatttggggaagagtgccctttccctgggtgcctgaaatgtgccaagtggagaggtgcaagattgccagaacacaggaagcaagtgcagggctgcatactgacttactcgacaatttaatgaggctgaagtatgcctctttaaaaaatgagaacgttttaaaacctcaagtagactaaataggaatatttaggatcagttgctgtgacagacaggccacactagcctaattaaagatgtgcataacatattgatgttgcaatagaatttcccaaattatggttatagtaacaattaaggaagagagctgactttcttggtgataaaagcacacactccacacatttaaataaatgtacacatgtaactaaagctgacatgaataggttttctatatttggtaatagaggctttgggttttacgtaagtatattgagagcaattatgtgcaaatgtatgtcccaaaagtttaaaactgatccatttaattgttaattaaaatccgaacattcccatttatgtaatcataaagcaaaatgaaatttgagtattaaatgttatagaaaaggaaacagctaaattaacatataataaatcaaaactttgtgactttttaccaccctcctcattgatttcatcctttgttctgacagccccacccctaccagcatgtctgtaccatgctcttactcccaaatgaatttgacatgtgtgtattggatttgtcattttaaggataatttatcatttttctcaagtatgaaaggatatattttttgagtggagaagagatgactatgtttctcagtctggttgtgaaatagcaactttcaatcaatgaccatatctccagacaatctatgagtgccagatgagaaggacagatgccactgtgggttagaatatttccaggaagcttttgtgggagaggtgagacatgtgctttggagaaagatttggatgggacagaggaagaagacaaagcagagttgggtaaaaaagcaaaggttcagaatatgtattgtgcattttccttcagcccctatgactcccagtaggccaaggacactatatggaaagctacagtaaagccctaatgtctatgctggtaatcgtcattgcctcacacttggtggatccatttcatacctttctctggattcaatacctttagtcctaatcgtgtggctcttctttttgtttggctggttatctagtcttgtagtgctcttaccttggccctactgccctgcatactatgtagggggtcacttctaataatgcttctctctgtgtacccctgacatggacacaactccccatttccaaggggcccctgaagtactgcccaggcctctgcaatcctctgacttccagagaaggaagtcaggcacatgtacaggtaatacataggtcaacctggctggaacttactctggaatatagaagaagatagaaaatgcattcattgggtaattatgatctgggaatgtgagtgggattatggaaagaccacactcctatttagacataggagtaatacatacatgtaatatatatatacattcatagttatgaatcagtatatacaagtatatggaaaatacatacatgtatgcatgcatgcagcatatacatgcatacatgttcacagatcaagttctagccacttaaatacaaacatacatagaatatatacaacatactatgttatacattaaaatggtatgtaaaatggtgtgtaaatggtgtaaaatggtatatatatacacacacacacacacacacattatatatatatatatatagtcaggtaggtgtatagtgtgccttttgcggttgtctactctccaccttccctttattagagaaggtggcccttccttttgaccacaagggtgagcagaaaagtcaggctagtgattggtcaatcaagtgattggttgaggggtgggctcatggcccaagatgagccattctgaagccttctcaaattttattatgtttttctgggacacactggcaggaaaggcccccttttctctggtggtaaagctgttgggatgtgattctctggatgtcagtagctgtgttcccaagacagaatgagacaaagacactgagagaagcagaaacaagttgcaaggctaatgtgaagacccagacaacacttcaggtcctgagctcaattcttgaaggcagcctcccctcccatcccccatggtttgggtgtataagccaatatatttgtcttctttttacttttgctggtttgaactgtttttgtcccttgcaaccaaaaaagtcctagctgatatattgtagttattttacagccaccaccaccaaatgttcagtaactcatctttaaacaaggtgccatctgaaggaggagaggagtagtctttccaaatctgcactctcaaacctgctggggggccaaacacaagtcacatccatcagtcagtgcaggtgtctgcaaggggtgaacgctgtctatctttctgcttaggtgcatattgcttagtaaactagcttatccttttgtggtagaaaaatgaaggtcaatttcccaaggttataatgccagaaaatggctggacaagactgactactacctgaattgctagtcgtactcaactgataaatcatatagtttcattataattgttagatgaaaatttctctattgctgtgaggcatcagcagtcaaactagattgattttcactttacaaatcacattttttattgatgaaaaatccattattatcataggttttaatgtagtgatcggttcctcaggaagatataccgcagttttatttattacagagccttaggtagaaaagtccccatttgccaactatcttgttaacgcacttgaaaggggcctattagaaattcaactatcaaattacctcatttgtgacaagcaaaggaaaacaaaacagtgtatctatcacaaataccttgatttgagggttgaaaaagatgatagaactcatgtcctgatgtagagagtttttctatagctcttctcaagctgatggcctggcagagtgactagtgcgaaaagctttcatcaaatggcaattggtattaaccaaataccaaatattttgaaaagtgcttattctgttccagacattgtgctaaggatcagcaatgaactgtaatttaaagaagtgttaaaattggggttcaccaaagaagagaacaacatggacccaagttaggagtatcctggaacaataccacctagaaggtgtttgcattgcagcctgtaatgatgatggctgagtaaccatcttacacaagaaattcatttcactgttcttaagaatagtgaacattcaagtaatttcaattaaacacttatatttaatgtctaaaaggtaatttgtcactaagtagatggcatcaaattgtgagttcttatttttcagagtagccttacaaagccttattcacaaaagaaagatagccattacagaatatttcatttcaaaaataactatatgcttttatatcaaatgttatccaccactgccccccacccccccacaagtttgggaaatagtatgtctggttaaccgagtcatctgactaataggcatttgccaagtatttaataaatggattctttatttattcatttattgacatggagtctcgctctgtcacttaggctggagttcagtggcacgatctcggctcactgcaacctccacctcctcggctcaagcgattctcctgcctcagcctcccgagtagctgggattacaggcacctgccaccatgcccaaaaattttgtattttgtaaaaatacaaaaattacctctagaaataccctgctgtggtgtttcataatatgtgtatttgagtatttgctctgttgtcttcttcaaatatgaacatttatgaatcccaaagtatacctggttcaaatgattttagataagggattgcaggcctgtgtcaaacacagactataaaaatgattaagaatgaataaaatacatgggaagcaaagttctagcaaaaataaaatatctctgaaaaataattgaatataatgactagaaataaataaataaaattgtaatacctcagtggttaggttaaatgacagtcactgtgttaagtattttatgtgccattttcttttagctcttacagagtacatactattttactgatttaactaatttttcaaggcccccaaagtattgattctatgctagtgtctttcattgtcctgtgtggcaaaacaagaacctaagactatcctagtcaacaaattcctttaaatggtttcacagagtgtctgccaattcatgaagtcagtaagttcatggaatcccatttgttgaatttactacatgcaacgcactgtgctaggctctgaaattgtaaaaaagaaaacactttttgcctagggataaataaaattttttcataatgttaaaggctaataaagaaggtagaataacatgtgaaagattattttaactctttaaatgtagtcatagaaagaaagtttggagataatacttcaaaatattaactgtgatggtctatatctgggttgtaaattttagaatttttttaaaaaacatgttttccaaattttctacaatgagcacatattgtatttattactagaattttttttttttgagatggagtctcattctatagcccaagctggagtgcagtggtgtgaccttggctgactacgacctctacctcccaggctcaagtgattctcgtgcctcagcctcccaagtagttgggacaacaggtgtgcaccaccatgcccggcttaatttttgtgttttagtaaagacatggtttcaccatgttgcccaaggtggtctcgaactcctgagcctgatccgcccgccttggcctcccagagtgctgggattacaggtgtgagccaccatgcccggttgaagaagtattttttaagcaatgtatatctgtgaaacactctagaactttcactatcatttaaagaataggatttaaaatgtctagataaatatattgtttggaatactttaaaaagtgaatattctcccattccttaaatgtgggtttctcctagtgactcccttaataggactacaatatggaaaggagaataaatagtaactgtggtggaaaggctgacaaacactatctcagctaagtgatcaaggttaacatcaatagtgacaaatggtgttggtagtatatacccttggtatgatgtgatgaaaccgacactttaccactgaggccatcttccccaaatcccataagcctgtttaatcatgagataaatatcagacaaataaatattgggggccgttctacagaacacgtgatgacaactcctctaaactgttcaggttatcaaaaacgaggaaagtctgagaaacccccacagccaagagtgtcctaaggaaacatgacaactaaatgcaatgtggtatcctggatgggctcctgaacagaaaaaaagacattagatcaaaactaagtatgagtaaagtatggacttgagttaataataattaattgtaacaaatgtattatactatacgagatgttgataatggagaaactgagtgtgggctatatggtaactatcttctcaatttttaaataaatctgaaactattccaaaatataaggtttgctttttttattaattattgcactttcatttttttaatttttcacatatatatatttttattatactttaagttctagggtacatgtgcacaacgtgcaggtttgttacatatgtatacatgtgccaaacactgcatgtactcactcataggtgggaattgaacaatgagaacacttggatacaggaaggtttgcttttaaaaaaggtatttaggtttttgacctgtgcatctggaaggttggaattgtcattgactgagatggagaagaccataggagaaggtgaattgaaaaaatttgaaatatactagtctagccccatagggcagggatgtataagatacatgcattgtgaatacatcactgttttaatattctgtatttaatacaataaatattttggcagagaaatagtgagtattctagaaataattcctgtcctctttaagaagtacaagttcttcaaagattccccaggaacagctgtgcaagtcagtgtggctttctaatctctttcatctatacttacacactataacagttttttctattgcaatgcagcccaagttttttgcaaggtaaattatttgtgatattcttaggaagaaaaggtagaaagtaaataactttttggtggcttggtatggtgttgtattttgccaataactatttatttccaatagtgtttaatgatatttattggattgaagaaagttagctatctttcaggtatctttcccagagctcacaggacaatatttccagcatgcccccggaatggtagacatgctgaaaatattgtcctgtgagctctgacaatctagtacttgtcacaaataattatttttacaattattattactattattattatattattgctaccattggtatacatacacacaaatatatatatatatatttggtctttttgtgctctttattttgtttcattgatcaacatttttttggtaaatgctatttttatataattgttgcttgtagtattagacctacttctttttgctcatcttttttcagaaatctttaataaattcacctctgtatgaatttcagcatcattttattaagtagatgggaaatcttgggtgtgtcagaaaactatttgcataataatgctgtgtaagaaatcacccaaactcagtggcttaaacaattgtttattcttgctcatgtttttgtggaccagttgccatccaggctgagatcggctgtgcttagttccaaagctgcaagttgggtcctggtctgtttcatgtgtctctcttcaccaatgaccattgagccacctggggcatattcttctcatggtggaaaaagcacaaaagactaagttcaatcttgaaagcacattgcaagcttctggtggcctcacatctgttaacatcccattgatcaaagggaggcccaaaatgaaggggggagtaaagtgcacttcacccaccatgaggtcaagtcaagttacatgggcaagtccaacatcaatggagtgggaagtatactcctcctatgaaggtgagagtagagagagtgactatttgccaaaaataatttcattcaccattctggtggaatatttatgggaattgcattaaatgttaacttgaaaacagacactattagaacaattgccttttctactaatatcttatctacacaagtaattgttaagtaatttgctaaaaaagactatgaatgtacatttcaagtagacttcctgtggtatctagtaggagcttaaaaaatgtttgctaaactgttattcatggatattttgtatttttcttatcttgagtgccagctcttaaaatgatatgtgtaactattttagcatgcaaaaatactattaattttatatatgttttcctgcatttggttgctatactgaactcttctaattaagttctggaagttttgggtttttttttttttttttgcattgtttaggtatgcaatctcaatgtttttaaataatctttttctcatttcttttcaatattgattgcattgactagagcttatcaaacaatagtaaacaatactgtaagatttttaaagacagtacttctaatgtttactcacttagtgtaaagctgacctgacctagttttctttaccatattaaggaagaattcaaatgtttttaaaattatttttctaaaataatgcctatgtgtgttgagtttttatcagatgacttcctggcatctattgaaatgactggatgatttttctcttggaacttctcaaggttgtattttcttattttgaaccaccactgccaattaatttcttttttttcatagtgtgtatattagtcattgttctctagagaaaaaggaccaacaggatgtgtatgtatatatgcgtgtgtgtgtgtgtgtgtgtgtgtgtgtgtgtgtgtgtgtatgtgtgtatagagagagatattgagaaggagatattttaaagaattgcctcatgagattgtgggagtaagccagtaggctggagactcagaaagatttgcagtttgactccaaaggcgatctgctggcagaattcctctttgctcagggacaccagtctttgttctattaaagctttcaactgattggataaggcctatccagtttatgaaggataatctgatttactcagagtctactgacataaatgttaatctcatctacaaaatatcttcacagagcatcccattttgagaagcagcctcactgtgtcgcccgggcgggagggcagtggtgcaatctcggctcactgcaacctccacctcctgggttgaagcaattctcctgcctcagcttcctaagtagctgggattacaggcacctaccaccatgcctggctaatttttgtatttttagtagaaacagggtttcaccatgttggccaagctggtctcaaactcctgacctcaagtgatctgcactcttcagcctctcaaagtgttgggattacaggcgtgaacccccatgcctggcccagaataatgtttaaccaaatatttgggtactatgatgcagtcaagttgacacataaaataaaccatcacaatgtataattcttttaatgaattgttgaatttgaatatttctcagaaatattctttgggttatacaaaattattatcccatataaaagaagaggcagttgaggctaggataggtaatacaactcacccaaagtcacacatgctcaaattggcaggactgatatttgtccctggctccaaagccccaggttttagtcatataatcaattacacagaaaggacatccaatatgctgatacattattcttcagactggccttacttcctttgctcgggagtcacctgcctataactctcatatgtgatttaatcttgattgtttttgttgaattggggaacttcacgaatgagaagtagaggagttgagatttttactttctggcatgagctaccgttaaactgattatctcgctgcagtccacatctggaccaagtacaaaagtgaagcctgacttcttactctgtggtgctgataggaataacagccacaacaccaccatttttgccatcttgctgatgaattgacctcatatttctctacctacatttttcaaaatagtgctcttttatgagttactcaagccccattttaaaagcagtgtggttgataagtatgtttcatacctgcttgtactgagcttttttaaccttgtgctcttgaaataatatgagcttttggacactatgtattcagtacagactttcagagtgaaaatgttgattttcccaaattaaagaactaggggatatggtaatatatgctctcaattttgaattaggtggaaattgacatcgtttgtcagaaatatactgaggataaaaatgaggtaaagttttaggtgctgagctgtgtgccaaatagcccttgtgtttctttcttgaacatctacttcaaagaagcagatttgcctttgatatccctgggagccacatgaatatgaactgactccaattgccctcatcatctccagaatttattttttatttttttagggcatgagtctgtggtcaatttgcttatttgcttctccaaaccagcatgatcattataattctccttttcatgaaataacccactctcagcctgttgttaatcctacctagaggttgggagtggagtcacctaacatgagggcattcatctcttcagtaagtggtgtgcttgtgtcagaaatttttatgcagacaaaaacacaggaatcatcatggcaacagaataatattcaccacctgagccaccttgacatttctcagctagtaggaagctttcttttttcttttgtgcttttaacatagaagaatgcctcctaagttttgcaggctacatagtcatgcccatgagcctcctcttttcaatgcatcctgcccccataaccatttttctctgtaagtgatgttaactatgcagaaagccaattaggagattctacttagaattccttctcttaactgtttctcaaagcttatgtggtataactgctagaaaaagatgtttgaaaaataataatatattctatattggccattcaatgtctcaccttcatgccttagctcaaactggcaagcttctttatgccatctctacatgtagaaaaagtctaccgattccttaaaatcccatccaaaggccatttcctctgtggtggtttgcctgtctcacctccttagcagtcacggctctctctcatgagtccttttaacactttaataataactaataattataaacacatggatcattctttaggttttacaaagtttgttgacacatcatttcatgtaacaaataatcttgtggctttgattatattctccatttttattctctttctctctctttatttatttatttatttatttattttttgagatggagtcttgctctgtcacccaggctggagtacagtggtgcaatctctgctcactgcaacctccatctcccaggttcaggtgattctcctgcctcagcctcccaagtagctgggattacaggcatgcaccaccatgcccagctaatttttgtattttcattagagacgtgatttcaccatgttggtcaggctggtctcaaactcctgacctcagttgattcacctgcctcccaaagtgttgggattacaagcgtaagccaccatgcccagcctatattccccaacaatggagaatattaaacaaataaacacaggagggttaagtaattttttttttcttgagacagagcctcactctgtcgcccaggctggagtgcagtggcgtgatctcagctcactgcaacctctgcctcctaggttcaagtgattctcctgcctcagcctcctgagtagctaggattacaggtgcacaccatcatgcccggctaatttttgtatttttaatagagatggggtttcaccatgttggtgaggctggtgtcaaatcaaactcctcacctcatgatccgcctacctcagcctcccaaagtgctgggattacaggcgtgagcccgtgccaggccaagtaatttgttaagtgacacacagctgtcctctgtcttctgacatcaaatgtcttcctgtgctagctatatactgttggtctcaaattatcattatcttagccaaccgttctggaggacatctgtgtgctaggcattcttctaagtggtttatatgcagcagcagtaatagccaacatcttcttgccagatatccacttagtcttcaaagcaaccctatgtaatagatactattattattccaccatttagaaatgaataatctaagggacagggaagtcaagtaacttattcaaggtcagataactacaggaggctgctgcaagtgtcggtctttccatatccaaaatctggtgtcttagtcagtgaaaatgctgcaaaacctcaaaattgacagaggccaccctttagacataattgctacaggaatattgatcccatctcctcttgtatttcaaatcttcagagtgcattccacagccttttgcctgtggtatccaagaccatagaggcaagaatgtctgggaaatgtaggtgttagattgccagcctctgctgggtaagatggcagaagagcatagaggaaggtaaaaatgaatactgggtaccagtagacaatatctagcatactcgtgataatgatgtaagactactgccatttctttagaatgcgatcctggtgagatggccaatgaatgtttagtcactcagatatgcagtggtgtccccctaccactagggggagatgaacaaccggcatagtttgatgtcttaagaaagattatttgttcatgagtaatggaaaaaaatactgagaaagaagtggttgctttctatggcttatgaggagaagcttatgctgtctttaatgaaaaattaatcagataaacaaatgtccagaggaatatatccagatgtattcctatttacagtcacttagtggatgtgccagcatccaaatgcttccttaatctttcaactatctaagtaatgattgaatagaacctttgctccacctttcctgcttaaatgctactttattagcattacttcttgtccataaccatcattgcctaagtgctctgcaacttacctatttaaatactggatagattgtcatcagttcctcatctgaccaatcatttgtttcaccaattacttgcagattctcattctcgtaatggtcctaccatggaactgttgcatctccctgttttcctcaccacctccagctaatcagggtagagtttgctctaatgagcttatgtctcaggagggcaggtctttctgtgaaaaactgtcaaaactcttctaatgggaaacaaatattaatgtaaatgtaggcatttatttgccaaaagagtagtagctcaagaattgctagcaataattaccctacttgccagtgtattgtgtcttttttgattattcctctctttctatgtagagacctgcctaaaatatctcatgaatttttctccctcaagtgtgcatttgtgaagtttctcgaaagattgattggaacacaaggatttcagtttgtggcgtcctgttaatcaggtcagatttgttaaagtcattagtgttaaaaatttctttgtactcacaattctccttacccagagttagttctgtggcagtgtattagtgtgggcagggtatcttccatcaacttagtgtttttaatggagcttaccagagttaatgacagtggcagtccccccagggaaaacaagacagttggctcagatgtcttgtgggagctgaacctgctagaatgttcttctgggggtttcatcactaatctgccaacaactggagtctgtatcctattagtttctattcactgaagttgtgagatgccatgtactttctttttccagtcatctcatttttctcatcttctaattcgtgaaagggacacagaaatatttagaaaaattgggattctgcaaattgtgagattgattttcctatgttcatctcatagtgttcagattgagataaggtactaacttcactaagctcttaagttgtccactataagacaaagtcaatactacttccttggaaagaaataaggccatgatgagttaggttttcaccatgtgtaggttattctaagggtttcaggtctaatggcatcccctgaggtagtaggtagataagctggtcatcaggttagagcctgtattttgaatcaattcatgtgtagtccttacgaccattcattctacagattctggtatctgcccacctctcaggcccctctctcattgcgccctgtacccacagtactcatgctttgcccattctgaatcattttgaatcctaaattatacagtatactttatatttaatacatttctgaattttcaagtgccagctcctcccctcatttacctggtaaactccttaccttctaggtcttttctgattgtcttcttcttgttggtgtgctcaggttcctagtgtagcttatacctgattcaaccagaacacctatagcaatttattgccatcacttttgtgcagagctcctcttatataaccataggcccctgaaaggctggaccctctttgcatctcaagtcttcttcttccattccctgcctgccattagtggtgtctccatgcaggaagaagcatatccaaaaatattttaaattatgtaaatttcaataaagtatttatttcaaccctcagagaaaatgagatcagatttgtacagagatgtggttctcctcaattgtggtaagtttaatgggtgagaatgctgagcaagatttgcattgcatacaaatcacaggaattaggaccagtgattggaaagttcaaaggaagatttaagctcagtataagtaataactttctgggcattaagactgttcaaaaatggaatgtgctatcttttcaactagtgaggtctcaatgactggaagtatttgtaccaagactcataaggatgctatcatatatgttctcatattggtttggaagagatgcttggcagtatcttttctaatcttaagattctatttttatttctgtaaatcagttcaaatgttaacttcttataattgccaattatggcttttatattcatcattattcatttgatattcatcatcagttaaaatttttctattaatcagtcaatgaaaaaattatcttttgcctcactcttcagtgaatctggctgtccttggttgtccatatttcctttcacttctttctatatacactataaaattaatgagacttttaaaaatctttcaattttagtcaataaatatttgaatgttgggccagatgcagtgggaggtacaaagaagatataacattgattacagtagctagtgtttatcaagtgattactggcattttacatatatggactcatttgtttctcacaataatgctatatggtaggtactattttcccattttatagatgagaatcctgaggcacagaaagattaattaattttccaagatcatattgctcttagatggaagaacacaagcaatctaacctaaaatctgaaggtgtaaccattaagcattactgcctcttgatgaataaatttaataagataccatctcttgccttcaaagatgattccacctggtagaattacatgtatttattattcactggataaggctgttcttaattttacttgttgtaaaaatttattctttcaaacttgtctgcattgttatcacttgatagtgttctggcactggccaaacaaaaatccatgtttatctaatttacaccacttatgatattctaaacttgctgtgtaactatatatgtctagtttgaactcaaggtgatatgattgtatctccatgattatgttaattatccttccctgagacttctccatttaccttttgcttttgtggaaatcacaacagcatacaataatccaatgacaaatagaccttttgatttggatatagccatcgttcccacgtattaaatgcatactacatgcagaatgtctaggaggaagtagaagatacatacacccaacaaaagataccatgttagaagtacaaataaagcgatgttggacaaatgaagtgaaattagtagtcacagaaatgagattcaccaatatgcctttctgagcatcttcgttggtatttgttttggagtggtcattatgttggtaatctcacagtaggcaggtaataagttacagtgattcttcccaatcttgcctgaacagactcctcctgtaaacacagctgaaaccctagaaagtataatttagaaaagcaatttttaaattttaatatgcatcagattaaactgaaagatgaggtaaaacaccaattgatgggccccagccccagggtttccgattcagtagatgtgaggtcagtttcaagagtttgcatttgcactttgaaagagctggaataatactaagaatatgcataactcctgggtgtgcattagaatcacctgtgattctggtcacaaaaacaatcaccaaacttctaaataaagacccaaagctcttctaatattaaaccctgagataaatatgagctgtatatatactttaaaaagatgaataaaataagtaaaggaatcatttacccaatttttgatgaatacgtgagtggcagcagttgcggtggtaagttaaatcaggaataaatgtttgcaaagtgaaaattgtaagaagcatctcctcttaccatgcagtttataaacaatcacaaatagggcaggcttgctgagctccttcatacctggcgggttattgtcatgaatttgtatgattattgtgtactttacaaatttttgttttacaataatttgtatttattcattcattcattttccaacccatttattccagctcagccgtgaggatggctggagcctatcccagctgcttagggtccaaggtagtaaccagcctgggacaggatgtgatctcatcacagggaacacacacacacacacacacacacacactcacactcagtcagattgggaccatttagacacaccagtgaacctcacgtgcacagctttgagaggggggaagaaactggagttccagagaaaacccacacagacatggggagaacatgcaaactccacacagacgttggccctggcaggaaattgattttttttcttcatgaacataatgaaatgctgttaaataaaatgatgtcgttcaaggacttgctgtaattaattgaggcttttagtatctccttttccaattatgttttccaattaccaaacattgctcatcacataatagatgctcaagtaatgtttgttaaacaaatgaatatctcttacgataaaaaatattgcaccaggtgggttgactgaccagatatttctaaccatgctggaatgacttatttctgacaaaaattattaattttattgatccaaaaggagccatgtaaaattgttttcctcttcttgcttgctattttcaatttttccaatttgggctcagctagcagtgccacagctgaaaaaagtgcatggattttaataaggactcctattgctgagaaggataataagtgagtctggagggcagggtcatactctcaaagcctttctgatgggagccaagattaaaatgcacagcaggctgagagggctgggaagaagctatgatttctcactgtggatttcctcagagtgccattagtgtaccaaggagaacacaggggagattgcatttacatgaggaaagcaagttagagttcagtgatcttgaattttttggcattatttcaattatttgttggaataatttaactttggcccaaaacatgtgtcttagtattgtatagatttgcagggcacagaatatttctggttttcccctaatgattgtcatggaatgcccttaaatttaatgaataagtgaatcccaagacaatggtatagaggtctctaattccaaacagtaatgtatttttgtgaaataaacaaggctcagtatttccattcgattcggtggcattgatggaatctgagcacattgggcacttcacaacacagtcatattcttattcaatcttcattagaaattcatgagataatcattgtgctattaacctcattatataggtgaggaaactaagtcactaaaagtttaaatgactggtccacatgaaaacagctgatgagtgatgagggctgtcaagacatctcaggttttttcttccctggctcaatgctgctctacccagcacctctgtggacaggaactccttttatcccccactcatttgatgagaagtatatgaggccagggaaaggcaagtgacatggccaagggcaaagggcaaggcattgtgagagtctgttcgggaatcacatctgaatctaaggagaaatccacatcgcctgccatcctaaagagatttcttagttgctccccctcctcattgggtctgtggtgtatttgtgaacaacagctgcatttgcaagtagccaggacttcctccagatgacatattgcgctgccagagtggagacaagcggggctgacttcacaggccaaagagggcatctgcatttgccactcagccccaattattcgaatctgctcatggcaggaggaatggtgggtcccttaggcacagaggccagcctctgatctccagactctctcatttctcctagatccgccccctcatgttgcttaagcaaaagcagggctaacccccgccccttggacaaggggcacatcattcctgcattccccaagcactctctggctgctgtatcagcaattggatgcttgcccaggctctgcaggactctagagtctagagcctgctggcccagaggcaagaggggtgccagatgtgcgagctagcaaaccgcggaagctactgtaagattagagtggcacagaaatagtcgggaaattaccctttccattgggcttggaatccagggtaactgaggcagcaaacaaacttctgtgtgtgtgaggtgtcccagtgtaccagtgtcctccattcgggggtgtcttcttcttggaaggaggactttttcttttaacccctaaagtgtcagggatctaaaagctggttggcaatacttgatgcctaaattgtggcctgggggtcacgatctcctgggtgctagttagaaatggggaatcccctggcccagtccagacctatggaatcaagatctgcattttaacaagatcccaaggtttatttgcatatttgagaaggcctgccctaaacaacactcatgagcctggggagaatcttaaaggcttgtgagacaacttgagggttgtgacacttcctaggtacttttgtagcctacactggtcctgtgtgattgggatctacgtctagcactgggtctgtggcgatactaacttccctgtctttcctggcccagactgacatttccaaagggctgcgtgaggtggtacatactcaggcaaggcattaacagtcacacaggcgctccagggctttctcctggcagtgcttgagccacgtggccctccatggagcacctatctctatcttggaccttttagttagaaagccaacagctgccctgcgtgggggaactgcacagtatgctaatgaaggagcagcatactgaaaatgatgttgtggctattaacatttttatgggtggactgctttgcaaagcatagggaaagtattactcttctaggattaatatatttaacaaaaagtctgccaggagaggaggtttttgctgataaatataattctgctgttgatttatttagtaatggagacttgaaattacaggaatcaatgtgtatatggaagccattgtcatttggttaattatgttttgccagcaggatggggaagcactttatgctcgatgcagccaaatgtatttcagccagaatcctgtgttataaatgacgaacacataaatgtagataaagagaaagacccctataattctagattcctggacacttgatcctccagaagcttgacatccctggccccctgcactggggctgtagcatgtagcataagtaggtctgcttcctctatagcaatactccttaacggggcttattttgcacccatgggatatttatagatgtctggagacattttgtttatcatagctgggcagggaagatgggcaacaagagagtagaggccaaggatgatgctgatgctaagtagacctacaaagcaaaagatggcccccacccccacccctaatgaagaattatttggctcaaagtatccatagttctaaggttgagaagccctattctagggcattcctatttgagattctgactcaaagaaatggggtgaagtccatattctctttgttgacaaataaagaaaataaggtgtgggcatcacatctggttatgtagtattatcttccaagatatccacccaggatggagtcaagatgagtgtatagtaggagagtctggaatagctctccaaccactgtcacttatctgaagaggtctaacactgtcaattggtcgccatcctattgtgaagatcatccccaaccttcctttccctacattctgatgaaccagctgtggtttggaaggcataaactttgctacagtcacagctgtgctatttactgagtgatcctgagagtggtaggcagtgtaatggccctcaaagttgctcacatcctaattcctggaagctgtgacctttcatggcgaaggggacttgcagatgtgatttagtcaaggatcttgaaaagggaagattcccctgaattttctgagggggtccttgtaagtagaagatgaagacaggggagtcagattcagagatttaaagatgcactgctgctgatcttgaagatggagtgaagctgaaggaaggagccatgagccaggcatgtgggaagttcctaggaaaaagaaaagacaaataatcagattcttccctagagcattcagatggaacacactcctgctgataccttgattttaacccccaaagactcattttatacttgtgatctccataactgtaagataaaagatgttagtggtaatttattacagcagcaatgggaaaccaatgcattaaggaaggcatttttccttttgaatgtcccactataaaatagggctttatccactataaaataggtgttgctcatttatttgttcctttattcattcaacaatcatttattgagtgcctactatgtgtccaccattctaggcacttgggagagagcagtggaccacagagaccaagcaactcctctaatctagtgacaggagactgataataaacttccaaaaaaatacagaaatctacagtgataaatgttatgaattcaagtgaagcagggtaaggcaaccggagtccacatctatttcttacaaatcattcagagcaggttctgtgataaggtgacatttagcaaaaacctcaaggaagtgggagagaaagtcatacagatattcaaaggaagaatatttttaatagaggaaatggcaagaatacattccctgagctaggagcttgattctgagattcaaagagcaagggaaccagtgttgataatgataataattacctcacaaggctggtatgagaattttgggcaacatacatgaaaccccctggtgaatttcaaaacactatgcaagtatttagtcatcattgcatggtccctcggagtgcattttgggggctgccaagggatgtgtagggtgacctttattttgtgtctatataaaagcgaaagggaaatagctattggcctcaggccatggaaattatgcacagaggcctagaaataggagtattttcccaacatggagctgatgattgatgatgattctatgtgtgtccttcacagtggcaaaccttcaaggggcagggacatcattgctgctgtagtccttaaaccctgtggtccagaagggtgctcccaaggtgccaaagggggcccagagcagtcggcttttctgtcatgggggcatacaaagagagaaatcatcaagaaattcaaagacctcaactcctgcctggccagggcccagagagaagcagttaggatagcctctgatacccagccttgccagcaactaatctgccagatgatgaaattgaaatatttgaaatataatccatacattctttttccaagacaggtggtgaaatggtctagtttttacaaaaggctgagaaaattaaaatactaaaatgttgcacatctttgtgtttgggagtaggacttcccctggaagctggggtggggattagagaaggcttcccctggaagctggggtggggattagagaagacacctctcagaatctagagctggcccattaacaccttaggtttaaggagctttctcagcccattttgtatttctaatcttaaaatgaccaaggcaaggtcacagataatatgtgtatttcatccttctttatgctgaagaatccgcttgtaactgaaaggtattttgtatattaattggattatcaggttagattctttttcctaaatgagtttctttaggccgtttctgcttgcttttaaaaaactttagttttaattttagatttaaatggtacaggtagaggtttattatatggatacattgcgcgatacggagatttgggcttctgatgatcctgttacccaagtagtgaatacagaaccctgtaggtagtttttcaagccttggcccccttcctccctcctccgttttggttgacagagtctgcagtgtctaatgtccccatctttgtgtgtgtgtggacccaatgttcagctcctgcttgtaagtgagaatatgcagtatttagttttccatttctgtagtaattcacttaggataatggcctctagcttcatccgtattgttgcaaagaaccttatttcattgtttaaaatggctgcatggtattccatggtgtgtatgtgacacattttctttgtctaatccactgttgatgggcacctgggtggattccatgtctttgtgagtaatgctgtgatgaacatactagtgcaggtgtctcttggtatatactcagtaataggattgccagctgaatggtatttcacttttagttctttcagaaatctccaaactgcttttctttctttctttctttctttctttctttctttctttctttctttctttctttctttctttctttctttctttccttctttctttctttctttctttccttctttctttcttttaattatactttaagttctgggatacttgtacagaatgtgcaggtttgttacataggtatacatgggccatgatggtttgctgcacccatcaacctgtcacctacattaggtgtttctcctaatagtatccctcccctatccccctgcttcctaacaggccctagtgtgtgatgttcccctccctgtgtccatgtgttctcattgttcaactcccatttatgagtgagaacatgtggtgtttggttttccgttcctgtgttagtttgctgagaatgatggtttccagctttatccatgtccctgcagaggacatgaactcatcctttttaatggctgcatagtattccatggagtatatgtgccacattttctttatccagtctatcattgatgagcgtttgggttggttccaggtctttgctattgtgaatagtgctgcaataaacatacgtgtgtatgtgtctttatagtagaataatgtataatcctttggtaatataaccagtaatgggattgctgggtaaaatggtatttctggttctagattcttgaggaatcaccaaactgtcttccacaatggttgaactaatttacactcccaccaacagtgtaaaagcattcgtatttctccacatcctctccagcatctgttgtttcctgactttttaatgatcgccattctaacggcatgagatggtatctcattgtggttttgatttgcatttctcttaatgaccagtgatcatgagcttttttttcatatgtttgttggctgcataaatgtcttcttttgagaagtgtctgttcatatcctttgcccactttttgatgttttttttttcttgtaaatttgtttaagtttcttgtagattctggatattagccctttgtcagatggatagattgcagaaattttctcccattctgtaggttgcctgttcacagtgactgaactgatttgcattcccaccaacagtgtataagctttcccttttctctgcaacctcactaatatctgttttttttaattttttatagtagccattctgattggtatgagatggtgtctcattgtagttttgatttgcatctctgatgattagcaatgttgagcttttttcatatatttgttggccacttgtatgtcttgttttgagaagtgtctgttcagtttctttgcccactttttaatggggttatttgtggtttttttcttgttgacttaagttaatcttatagattctggatattagccctttgtcagatgcatagatgtaaatattttctctcattttgtaggtcgtctgtttactctgttgatcttttcttttgctgtgcagaagcccgtccgtttaattcagtcccgtttgtctatttttaattttgttgcatttgctttggggatcttcatcataacttatttgcctagtccaatgtctagcagagtatttattaggttttcttctagttgttctctatttttttgataaaataaatgcctacattttgcagaactgaaatattaatgtgtacatgttattgtctgagtaaactttgtttttttagactcatagtaacaaaaggaaaatagacatctttagcaactctttcagtaacagaacatcttttgtataacctgaacttttatgtcagttcaggaatataagaggaaaagaaaggaaggcttggcaagataggtagctccctatcaggagaaacgaaaatgaaaagaccgtcggatcagtgtatactctgagttctgtgggagctgagtctgtatcctagaaagcatggaaaagtagtctagggcagaaataaaccaggcatgctgccaggatgaacaactagaaaaaccctttggaaccatggtctgtcaaatgctgatgtgcaggcagcttcctctgtccccaaggtcagaagaaattcctatatcgctacttctttcttctcctcaacatctgaagcaaaaccctacagagtacaaaggtaaagtgaagacaaaacaagtccttctagcttcaaaatgctttgatattctttgtcttttattttcataagacttgatagcatgttaatgccacagaatagcaggattcccttccattatatgataaacatgctagtgaaaaagaattataaaaaaaagttttaacagaggaattatggcaacctatgagaattgcttcaagtggaatatatattcatgtattcatcaaagagttgtggtatccactagatgtcaggcattgagcaaaggattggacaaggggcaagtagggcaaggccctattctgggctcctggaattcataatataaatggcagcatagacaaatatgcaaatgaacaaatatgcagttgagttacaaattgtcaaaggtgttatgaaagaaacaaacatgatattctgctagagttatgactgacaggtaaagggtgagtacccaggaatggccttgctgagatttaatctgagagctgaatgatgagagggagccaagtacattgttataggtcagaaacagaaacaatttttactctggctcttctgggaagacatgaaagcctgtgtttacaaaaggagattttgacttacctagtcacatgatctaaagaaacgcttttactcttattcttctaaagcgacatttcctggtcccccaccctcctgaccacatttcatattctttttccctgcattatttttttctccccaggtattataaatatatgacatactttttcatttactaatttgcctggtttaatgtctgtctccaccactagaatgtaaactctataaggaacttgtttcatccattttgttcatgatggctgtctctactgcttagaagagtaaccggcacatagtagatactcaatgaatatgattcctgctatactaagctatttctttttgcccctggagagggagatatggaattttgaaaactgccaggtctggaagaatatgctatactttccaaggttgttagatttgaatgagaaaaatatacactaaagtgagttccatgctggtgtatagtaaaggctgagtaaatatcattcttgggtacttccctgtctcttttttcctaagcacactcagtgaggtgggagctgtgaaacgttatgaggtaggagaaggtgatgtctaatgtttctctactgccctgttggcgccccccaaccaagtatctctcagtgcctttgcccagccttcctctgcacacactacagctagctctatcatttcctcatgccccatcaagtcctacctgtcttcgcagaccctcaggttccttggctgtggcttacaagggacatctgattaatctgtaaccaattcatgttgatcccctagctgattgcctctttgtcaccatgaggccagctccttaccatgtgtgggtgcagcaagcaggtacaccatcaccctgcttgtgggatcaggctccttctcccccggacagtgatgaggagacactgtcttcatttgcctctttacctttcccattttaaagctgttgactaacttcaaaaagaatctttttgaattccttttactcatagaaagcagaacaatggaatagtaaggaagaaaagagaaatcaaggctgcagaagagaagacagaggcacagggagagcacagagtagagagtaaggggtaagagaagagaagacaggagaaaagagaatgaataaaagaacaagagagaagagaagcagtgggtaaacagcctgttagatggtggcatagcttttacccactgaaaagatgttcacagcaaggtctatcaaaaccctaccacagtatagcagctctaccttgaaatagtatttctaatgataaaaataataacacaataaagtttagtaaacagtatgctaagagctttgcatatgttttctcctccatgatccttttgattgaaggcaaattttgtcatcctatgctcaaaattcttcagtcacctctcatcttactctgagtaaaaggatggggatctgctccccaccctttcttccaagtaggacccgttcctcagccccagctcagacagtatgcccctcccactctctctcttgctccctccattccacacacactggtctccttgctatttttgatcaaaccaattgtccttcctcagggcctttgcactggctattgttttgcctggaagagtcttctcttagatgtcctcctgactctctcccttacatcctgtgggggacttcttcctttgcttcttaagcaaaagtctcccatggccaccccctataaaatgtcagcccccactaccatctcttcctcctgctagctactcccccactttgctttaattttctccatactacttatcaccaccaggggtataatgttattttatgtcaattgtttgtcttttgcctccagattatgagtacagggattatgtcagctttcttcttgattcatacatcgtcggcacttacgcctcgaaggtggatactgtttttccttccgtagtagaggggaaaaagtaagctcacaccaggtaagtaaattttccaaggtcacagacaggaggtggtgaagccaggtttccaacagagctgtgtccatgtccaaggcccatgctttcaaccactgtgctagaggattccccaacggctttccacactgttaggacacctgtccgaaagggtaggttggcatttcaggagatgcctttctgtgctcagtcaagatcaatgcagatgtaattgtgtaaagcaagacaggactataaggcagatataactgcgtaaagcaaaacatagacttataaggcaaggttggtacaaatgcacatggctaaagcttgacctgtacgatttactttggctgcaatgcacagctacagaggcagtggggtatggtgtgtggtggttaaggacatacgttttgtgagatagatgtggcttccaattcctacggtgccactacttagttttgagaccttggccaagttacataatgctcctgagcacccagttccttctacatgaaatggggctggataaatggaaataatgcctacccttagagttgacttaaaaattaaataagggaatgtatacactgttcttagcatagtccctggctcatgtaaatattcaataaacactaaataaattactattattataattattatgacgtttacttagtatatagacgtagagaaagttttagttgaaattgtatctgttaatacattattattttctgttaagaatgaacatctacatttggaaatagaacaaaaaaagagcttactgcatatcctttcactgtcatgccacagcattgtctaatgagccgtcctaagggtcatctcactctgtcagacaatgtaattttgtttggcttaaaattaccactgattacagtctagcctctgcaaagttgatgttagcatgtagaaaattaataagatgcaaatcactgctgtccaatagagaggcaaatgatttctaacaatagagaataaaacagtagagaataaaatgttaggattttattgccctttagactattaagcagttttggatatatgacttaaaaacgttattccagcagtcttttccccatccatccattcatccacccacccacttacttacctacttacctatctcagtttcttgcattctccttgaatccactttattattttgttggttcctttattaatgattttaatatatctttgatacatccccctatgtatttgtatgagaataagtttatatatatatataccaaaatacaatacaatacttacataatatagatgtactcctagaaagcaattgatggtatctaagctatttaatcttggcaaaccctatcagatacctagtttctgtgctgctactcctgatgatattgactccttataagttttactgtacttttgcttactaaatatcagaaaggtataacatagtgtttaagatcagtggctctggagtcaaacttcctgggttcaagctcttgctctatctatcactaattagctctatgatcttggaaagttgcttaacctaccaacaaaatgaggccatatgaatacctcttatctcagagaatattttgaggagtaaatgcaataatgtatataaaagtgcttagcatggtgcctggtccatggtgtttaataagtattggttattatgatttatgattgatcttcattttggaacttaataaagaaaatgaaactttgcaattctattgtgaatgtttgattttaatacttcctcagcaaactccggtagtaattgcataatacgacaactgtttttcgtagaagcctaccaactagaagttctgaaagcaagtgtttaccatgaaaggtgtttaactcttagagagccctacaaattaaaatagcctacacagaatacaactgaaaaatggcctctactgtttattttctaactttctacactatggtacagagataacttattgtttagtagtgactggtctagtctgttttattgacttgtgcactttctgaccctgtctaatttagtgtcagagatcacctgtgatttttgtatatttccgaatgtgtaagtatctttcccagtaacttgtacattctgatttcctttgcacatgagaattgatgtggaaaaggcagctgagcagaggttggcaacctttctgaagtgctatgccaacttcccatttattcactctaatttaaggttttccatgccaggatgaacctcctatcatccaaaccactggagactgagaacttccaagacagagcaaggctacagaaattgaaattttcattgtatgatagattttccaactttttttctttcctgaaaaccaagaactttgaaaatgctgatgccaattttatgcaacccagacagaacgatcatatatgtagggaaggggttggtgaagattgcagttccaaaacctcctgaagcttttcatacaacatttattcattcatgcatgcatgcctatatatatatatatgcattgtgcattcatttagtaattcattcattaaatcaatgttgagcgtctaacaatgtgccagccactctggttatgtatttacatatacaatacttaacttttttgactaagtgagagaacatacttcatgcacgtagcagagtgcctggctcatagtacatactcagtaatgaaaaccattagttttaatcttctgtttaaaattttacaaaagtaataaatgtacatagtaaagaatctaatagtgcagaagagttgaaataaaaagcagcaattccccatgctgcttctgttttctcccaatcatattctccagagccttaattttaaaaaaatcagttcttctgatatttacatatgtaacattaaataatgcaagtaccagtggtgtgtatcctcccctagactctcatagggaaattctctgcttgttcagcctaggttcaccttggccaggggtagagttccctcttatcacttttctaatgagattcttaaaagtgtccatgactgttgaacaccagacttgttgtctaggggaataaattggcgtggaggagaccactctggaggacagctcatcttctaagtcctttttgcatgcactgctttccagacctgtgtggaaggcaatatccttttcatcccttcagaatttcttctctcttcttgttgcctcttgcttttcttacatgtttctctgtgttctgggctttccaagaaaaaacaccctgaaagcctcttagtctggctttttgaatttttgttttcccccttggtaaggactgggggtggtatggcaagaggaaaatgacccaaaagatttggagggaaatgcgcagaaaacagctagattaatatttcaagatagaaccatcctgatatattttcttattttactattctttgatttatcaacttcagacattatttattgactcctctctataaaaaaggaggatttatctcatgcttctttctatctgctcctctccttcccaaagttggatcattatgttagcattttggttcttctgttgtttctctttctaggtttaaataacaaacttagatctctttgcatcaccttgaggcagtgtctcttgtctgtccagcaagatgagggtatttgctcccctatgcttttctcccctttttcattgtcaaggttgctagtgttctattctatagatgtatttaaagtttctaagttttatatatagatagcttgactataaaagttgaaaaatggtatacaagatttattttataatgtcgcttagaaaaatttgaaaattgactgtgtattagaaattattcactcaaatgcattattcatgtaacatttctgttggttttttttcaacataaaaatttcaagagaaaacctagctcatttcaaaatccagattttaaaaaggttatttttgatttttattttttaaagcaacggggtctccctatgttgcccaggctggtcttgaactcctgggcttgagtgatctttccttctgagcctcctgagtagctaagatgacaggcgcacatcactgtccctagcacaaaatccaaattttcaaacaagttttaaataggtaaactttatcatgcttttatctccctcacaagatttactaagcattgggttcaaaaagaaatatttaagctttaatttttaaaggaataactactgacagttaataatattaagaaaaagaacatgaaaatgtcttttgaatgacacattttaaaaacattagtttgaatccgatttcttcagttcaagtgcaattaatagtctaataaaagaatcatcaataagatgggtaaatgtgtgaatcatgtcttagatttttaaactaagacaagttgaaaataaacacattttctggcttcatagataagccttgtgttatatcaactctgtgacatagattaaaattacaataatggattaaaagtattattttatctcatctaagacatgtaatattagtactgtaatgtcttttagtacttacactaatatatgggctgacagtggtgaaacaaatactaggttcctgaagctttcctaagcattataattctgatatatgatcatattattttcaacaccacatctcaattttctgacacattttttacttttataattctaggatttgcagcatcacattcttctctaactccttgcttatgtgactaagaaaagtgtttaactaagtacaaaagttcagagtgtaacttagtgttaagaagtaagccagattttgtcccagatcttacatactaatcagctttcactgagagattaatttactagaatttcttttgagtgtgcgtgtctccattcatacaaagattcggctacatttttcttttttgtgtattagctttgtcaagtttggcattaggcttatgctggttttataaaatgaataactttctatctttttgttcagcctgggaacaaattatgtagcatagtcattttttgaagatttcaaagaacgtttttcaaagaaatgtgtgggcctaaatatccttttggaaatatttcatttataacattttcaaacattttcataattatctatattgttttaaactccttcctgagtcagttttaaacacttgcacattcccagaaaattctctttttatctaaattttcaatttttttagtataaagactatatggagatctgtgatatactttaaaactactataacttttttttataacttctaacttgttttgtgctttctttttttgtctttgttagagtctccatgtttgcccattttgttcgtttttctgacagcctagctgttgaatttatttgtccactttagaattaaaatattgccaaatttattcttataattaaaattttttcagagtttatgagaagtaggataatcatatatcccagttgcctggcatattctggtatatgccttctatcccaacgtaattattagtagtactctctttcctccccaaaatacatcagttgggtaataaattatgtggccactctaatgataagtgaaacatacattttcctctcaatacaatagcaggctataattacaatgcataattataattacagatattgtctcatcccctgggatgtgaaaattcatgttgaggaggttggggtgggggaaggtcaaaaggcttttgatattataaatgtttgtggccatccgaagggccatagtacctaagtagataacgagtttaactgcagtatcaaatttcatgtgggagggggtataagtaggataaaattgtcttaaccaggctccttagagggacaataatgaaaaaagaaaaggttgagaaaaatgttataatgctgtttgaataccaccattgattagttcattttatttttctccttaatagtcatttggtgttttctaatttgtaagtaaatatagtttctgtttaaacaataagttattgtttcaacactgaaatacccttgttgacatcatcagtggtcaacattgtcaacacattgttctgtgtttttggctgactctgcttttcaataccgtctgtccaacttgactatttcctccttttttttttttattgagaatattattgggctcataggattaaatgaaataagatagtaaggcattcagaactgtgcctgtccctcctgctttccctctgtctcactggttattttcaaactttttggtttccttttttttttttttttttttttacctccggccaatctctaattgctggagtgctaaagagcttgagctctttttcttctctatctgcattttattcctgaatgacctaatctaattacattgctttaactccttctgtataactttatacctccagccctgactcgtaccatgagcctctgacttgtatattccattacctgcttgatatttccatgtggatgtataataattatcagaattaggtacaggctcaaaactgaatttttttcttcacatctgttctacattcctcctcgttcctataaatggtattgccattcactcagtttcttaagtcaaaaacctaagatgcattctagacatttctctgtctgccttcctccacattccatctgccatcatgccagctggttatatcaccaaacctgtccacttctcttgattttccttgttactctaatccaagacaccatctgctgtcacctacattctccactggtctcctgcttccactctcatcttccagccctcaccctcatcatccattctccaaagagatctcttaaatatacaactagaattactccactccccttcttaaattctttattgggctttcactgcagtcagaataaacactgaactctgtatcatggccaataaagaaccatgctcccatctcctctccagccaccctggccttctattcccttaacatgcctaaccagtttctgtcatgggcttgcttgctgtttcctctccctgtacgttcttcgggcccacgcgtttctgtggctggccattcttgtctgagcagtctcagctcagttgccaccccttcagagaggcttccaacctggcaccataactaatgtcagctcctttctaccaatgattattgagttgccctgcccaacttttttttttgtcaaatcattgttcgtttgttttgaactggagtgtttattgcagaaatttggccaaggttccaattgagtgactccagctgaggttagactggggccccttgcccagggctgggcacctgagacaggaaacagtgaagggatctgggcctcagagctgtgagatagaactggggaccaggctgcaggtgaggcctgtatggtcaggttcatgcaaggccttcaccacaccatcctctatcaccaggaagaacctctcaagctctcatcctcaaagagtggcaacagcaaatcatctagtaacaaatcagtctccttcccagaggccccagggctgccacccatgagctggccttggccttctgcactgtggcctgtccccactcaccagtcacaaagacacaaagacagtggcacttaaacatggatctggcccccctttaccttcagaaccccagcctactccccaaacccaagcaggtgggtctttgacagttggggtgaaagccccagggattctaaacagcacacccttctttccctggcatagttctgtcaggtccaccttgttcccaggctccctttcaaacaccactaatgccaggatagcatctcccaccatgacaggtgccatggctgcaaagttactgctgaaatcgtgggtccccaagcatccactctccttctctttctagtagtcacgctgctcctgctgctgctgttgctaccactgctcctgctgctatgattctatcatagcagccccagtgaggaccaacccagttcaatgtttcagggcgcacagttgtgccagctccaggctgggccctgtggctgcgacagtcctgtctctgtggttaggcaccacctatcctattcagccttcttagggttatcttagtatttggtatagctccttcttttctgttgtcctcccagcgctatcatgtcagttccgtgaaaaaagagacctgtttcttcattcacaatgcacatgttctcagtacctggaacagctcctgtcccacagtaggtatttgtgtgtatattttatgtaatagatttttggcttaattctcatggagtcaaatgatgaatgtgaaattcttaaatgctgaaggtttgctgtatttagaagtttttgttgactgatgggttggttggttggctttaaagtgaagtaatccatcaggttttatgtatgtgaacttttatggaatttggtgaagtgtgtgcctgtgtagattagtatataggagagaagtttttatttcttttcagatgattagttatgctttgccagtatttcctcagaacttctaagagtgttggtttggggggatgtattcagtattgacaattccacgtttatctacattcagctgtcaggttggttatttaaccattccgaggcttttcttttctattatggtcacttaaaacaaagtaaagcaaaatgaaactagactgttttggtaagcttttattgaaataagaggggaaaatgtaaggggtaaaaattgctaaattatttgaaattatttttggatgcagaggttgactttattgactgaaacagaatttaagtccttagcatcttatctggatgttaagaattgcctatcttttggttgtttccagaacaatcatgtaggttcctttttgcttagactgaaaatgatttgggatgaagtaaaaaattcactccctcacaatggattaattttttttctcagtggagatgccatgcggtcagaatttcttgaaaatgacccacaagcttattactaagcagctttgggccaatgagcagtcttttaaagaaaacattttatttatttttctaattggagaataatctatgttcattgtaaagaaagaaaatagaaattatgtatattcctaccaaagacaatttccattttagtgtatttcctttcagttctttttctgatatactatcttttctcttctgctttgagatgtgcattgtgacttccctttgtgataaagaggataaatctgctggctcatttccttttatagactgccaccttctctaccaacgaagaaaatgtgcattttggattttgcttgagttgaaacaatttatgctggaacaattataaaaagtagcatctgtaatgtgaatttggcccactctgtatcagaaaaaaataacttccaccatagcccgagaggaaactttaggtatctatcaccgatagagccaatgcttttaatacatatttcatgatcacagctgaggcttttccaaactcagagtgctgtatcattcattcactcctttaaactacaagattatttttggctctttgtgttggcacataggcctttccattgctgatctgcatgaaccatttatcaagtcaagggtttaatctatcaaagtcagagtttcttttttctgcctgtctctgtctcgctttcccagatggtattgtctcatatgtgtacactgttggcttaaaaaaggctatttggaatgcaaaggtttatcaagtttctccattttttttcaaaataatatattatggagcaaagtgatattttataggcaataataattatagtgttgatcaggttctaaaacattacattaactataatgtcccaaacctccttcttggctaatattctggttccgttcttgccagtagctcctattttctctactcactcattctgaaaacttgaatcatctttgattttcctctctcccctttccaaacatttattgaattgtcaaattatttggattgtatctcctggatatttcttgaatccatcctccattgcctttgtgtactggactcatgatgttgcctgttgtcttcaaagaagcaggcaattcattttgaatgcttttgatcggatccaaatataaaggccaaaacaaattaagtaatttatttaataacactgactccttgccgcatgccaacccccgatctagactctggtgatatagcaatgaacagtagggttaaaaaaaaaaaaaaaaaagcctaatagaatttacatgccagtgcaggaacaggggagaaagggacaaaaataacactagtaagtaaattataggatgttggatttgttaatgttgttatgaggaaaagtaaagggatgaaaggctgcagtgagacctagggtggacagggaagggttagagttaaatcaggtggtagggatgataatgaaagttaactaaaacttaaacaggcatcataaacaaagagaatacatcaaaaagcattctaattatgtcagctagtgtcctgaatcccccagtcctgatacctaggatacatagataatgcacagggatcttcggtgcctgagcataacgcaatgagaactattataatagccaccaagctgttctccctctctttgagccattcccttcccaggtcagcactttcagcaaaaccgtattgcggtctaaacataagaattgtgcttaggagaaagtgctaaagttgattcaaagaggcatgtccacaataggtaacccaaggtacgcaagaagaaattccaggggccacagtaagactcaaatcaaaatcaagaataatatttagtgaattcttactgtcaaatgaaaaagtctaaagtctttagcctaatattcatggctctccagaaaatagcttaatgctagttttcttttttcttttctttttctttttttttttttttcatttttgagaccgagtcttactctgttacccaggctggagtgcagtggcataatctcaactcactgcaacctccgcctcctgggttcaagtgattctcataattcagcctcccaagtatctggatttacaggcatacaccaccatgcccagctacttttttgtatttttagtagagacagggttttgccgtgttggccaggctggtctcaaactcctgaccccaggtgatcaacccgccttggcctccaaaagaccatgctggttttccaaccttatttcctagcactcatcttcacatccttccacatgtcttccaatttccttccttgttgtctttatttggatggaagatcttctaccacatttttaggttccaaattctatccttccagtgggactcagatcagatgtttcctcttgtatgaaagcttgacagaaatcatcacctcctctttagaatgttaataacaaactcttttctggcatctggtattatatttactatatgtgtgtgcctcaacatttctgttagactaaagctctttgagggtagccatctggtccggctgttctttgatcctttccccttggcccacacagtgttcagcacagatgagggaatgataacaaagtgctcagtggtattttcaatggcctagtttttcaatggcaattcaaaaatattgttgcactggagtgcctccagatgaaggtcctagaaatggtaaaatgtcatgaaatacctaatcagtcaaagacagggaatgtttagcttggagaagagaaaagtaataataggcaaattttttcagtattcagccccctacctgcctccctgccaacatactacacctttttcattatttttattaactgaccttctggctatattcatcagtgctcaccacttctttttttaaaaaaccattttctcccctcagtgcatagggtatgtctcgaatctctccatctcttttgctggcttttttgcccctatcgaatctttaaatgttagaatctaagctcagtcttagatgccctattctcagttctgattaatcgatgcttgtggcttcaattttaacctacatggtggagattcacaaaagcatacattcaacccaggcaagatgtcagaacttccaactaccaactcaacatctctctgaaaatgcttcagaggacccaacatgtacatatggaactcacgaaacctttccacactttctaattttaatgaatgactttgcagccttccctgtattaagtcaaaattctggaagtcacccttgacagcttcttctcccttactccttataaaaaatccatttccaagcctctagtttttacctcctaatgtatctaaaatctacttagagatagatcatttcctcatataggacaccattgtcccttgcttacctagatttctgcaaaaactaggctacccccatccacatttgcctcctccactctgttcttcactcctctacagttaccatggtgattttttgaaatgcagattttattgccttatttccctgggtaagagtctccgggattcttctgtgccatctctaaactcctctgaatatggcccacaggtctctgcttcatctggacctccctgccactccaacctcatctcataccatgttgctcttatcttcctttggttcatccttcaaacatagaggacaaactgcgtcttctgtctgggatgctcttctcttctgtttccacctatttagatcttttacctcttagatcaatcatcattcccttgaagaagcaccttctgatcttcctgaatagatcaaatccactattagagtctgtactggcatcaggttattaaaatacatattgcaattgtaattttacatttattgctgagtatttctgagagtagggtaggaagaaggagagctgcaagacatgaaacaagagaggacctagggaccagaatatgaagcacttagtaaaccatgttaagacattttggatattatcctgaagacagtggggaaccattttaagaggaaatgacaggatcctattaacatttaaaaaatatagtggttgaattatgtccctccataatttttatgttgaagtatcaatccttttacctcaggatgtgaacttatttggaaattaggttattgcagatgtaagatgtagtaggatgagtaagattagtaagatgaggtcatactgtagcagagtgagcccctaaaccaataagacttgtgtccttatttttaaaaatatcatgcggaaagatagaaattcacacaggaagaatgctatgtgaagactggggttatgtttccacagatcacggaactaccagaagttagcagagaggcctggaatagattcttccctagtaccttcagaggtagcatagttctgccaacacattgatctcaaactatagattccagaactgggagacaatagaatgcagttatttaagccactcagtttctaatactttgttacagcagccctagaaaactgatatagtaaggataattctggctgcagtgtagagaatgttttggaagtgggtaaaactgaatatggtgagacaatttgaggctactaatataagagatgacagcagctgtggaaaagattagagaactaatttgcaagtagaatcaatgaagataggtgaatgattagacttacagagtggagagaagaatggcttgagaaatgatggaggattttaaatcccatttattgagtgatgactcccaaacatacatctttagctaagacttctcttcagtcttccagattcttatatccaaatgccagttaagctacacttggtttttccacagtcgctttgatgaatgtttaaagaaagaaattggtaactaatagttaataagagctaccatatagattacaaaggagaattaatgtattatttatctgaataactgtatgttaaaggaagataaactttcattctacctgggaaagagcttttaatcaaccatagctcccaggaatagaatggaatagaaaacctacccttgtgaggtagacttctgtctctgattacttcatgcagggtctaaatgtccataagtctacaacttcagcctgtttatccttctttttttcattcacatggttctttgtttacagctctcatgttgttctctttacattcaggttatatagaggcctgtgatagtcctcatatgatggtaaggtttctcacagcaaagaccaagctttgttaattttgtcagcatatggtgcctaacactaagctgtatacctaaccagttaataactgctgctttgttgagaatgaaaaagtttaggccccaatttcaaatattttctaccccaactatgttatgcaatatattaatactaaatatgccagtctattttcttgcttagtaataaaaatacaacgtgttgagataaaatatttctggtagctaatcaatattccagttctcaattatccatgctagattatattatgcattaatttgattgcatgctctgcagtatattgtgtatgtgttgtgcaaaggcataattgctcatgttcatacataataagtaggtttgggaatttgtctggaggtatatcttagttattaatagtgattgtcaagtgcacatttcaagtttagaacctcgttggccttctgggagtcagagtctcaatttcaaggaaaatttaaacctttcctttcatgtattcctgttcacttaatcctgtcaaaatagaagattttgtgtctaagaagaaagagctagaggctaattaaaggagtgaaggccagggtttcatggacctctgatttctctccaaatgagtgatgaattaaatgtaaataagtcagaaacataccttaggttttgcttttttttttaattgttataaaaaattaatgtaaaatttagcatcttaaccattcttaagtgtacagttcagtagtatgaagcatatttgcattgttataaaatagatcttcagaagttttttcatcttgcagaactaaaactccatacacattaaacaactccccattcccctgtcccctcatttctctcttggtaactaccattctcctttctgtttttatgaaattgactactttagatgctgcactactgcatggaaccatgcagtactggtttttttggtgactggcttatttcattttatataatgttcttaaggatcattcatgttgtagcatgtgacttgatttccctcctatttcccatataatattccattttacatatataccacattttgtttaaccattcatctgtctataaacatgtgggttgcttccacttcttgactattgtgaatttcttttttaactaagtgtatttgaaaatatacagtttctgtatcagttccattttaaattttctctctatgaagatgaaggaagaatatttttatacacttgaaaacttaaaactctttgtcacttaagccttctgtattagtacattctcatactgctataaagaaatacctgaggcccaggcatggtggcttatgcctgtaatcccagcactttgggatgctgaagcaggtggatcacctgaggtcaggggtttgagaccagcctgtccaacttggtgaaatcccatctctactaaatatacaaaaattagcctggcatggggcacacgactgtaatcccagctactcgggaggctgaagcaggagaatcacttgaacccaggaggtgaaggttgcagtgcgctgagatcacgccactgcactccagcctgggcaacagagtgagactctgtatcaaaaaaaaaaaaaaaagagagaaagaaagatacctgagactgggtaatttataaagaaaagaggtttaattggctctgggttccataggctgtacaggaagcatgacactggcatctgctctgcttctgagaaggccccaggaactttacaataataatggaagacaaaaagggggatccagcacttcacatggccagagcaggaagaagagaggcggaagtgctacacatgtttaaacaaccggatctcttgacaactcactcattatcaccaagacaataccaagggggatggtgttaaactattcaggagaaactgctcccatggtgcaattacctcccaccagaccccatctgcaatatgagggattacagttcgatgtgagatttggtagggacgtagatccaaaccatatcattccacccctggcctcccaaatctcatgtccttttcacattgaaaaatacaaccatcctgtctcaacagtcccccaaagtcttaactcatttcagcattaactcaacagtccgaagtccaaagtctcatctgagacaaggctcatactttctgcctatgagcctgtgaaatcaaaaacaagttacttacttccaagatacaatggggttatagacattgggtaaatactcccattacaaaagggataaattggccaaaacaaagggctacaggccccaggcaagtcctaaacccaacagggcagtcattacattttaaagcttcaaagtaatctcctttgactccatgtctcacatctgggacacactgatgcaaggggtgggcccccaaggccttgggcagctctgtccatgtggctttgcagggttcagcccccatggctgctctcttgggccagtgctgagtgcctgcagcttttccaggtgcagggtgcaagctgtcagtagatctaccattctggggtctggaggacagtggctgtcttctcacagctcctctaggcagtgccccagcagggactctgaacatgggctccaactccacatctctcctccacattgccctggtaaaggttctccatgagggatctgctcctgcaacaggcttcttcctagacatccaggcttttcttttctaccacatggacaggctgcaaattttctaaacttttatgctgtgcttcccttttaaatataagttccagttttaggtaatttctttgctcacacatttgagcataggttgttattaacagctgggccacatatcgtacactttgctgtttagaaatttctcccactagatactgtaaatcatcactctcatgttcaaagttccacagatccctggagcaggggcacaatgcagccaggttctttgctaaggcattgcaaaaatgacatttactccagttcccaataagttcctcatttccatctgagaccttcttggcctggacttcattgttcacatcactatcagcacttttgttgaaaccattcaacaagtctatcggaagttccaaacattccctcatcttcctttcttcttctgagccctccaactgttccaatctctatccattacccagctctaaagttgtttcatattcaggtatctttatagcaatgccccattctgtattcattttatgtattagtcagttcttgtgctactataaagtaatacccgagactgggtaatttataaagaaaataggtttaattgatccacagttctacaggctatgcaggaagcatgatgctggcatctcctctgcttctggggaggcctcaggaaccttacaatcatggcggaaagcaaaaagggggagttggcacttcacatggctgaagcaggaagaagagagagaggagagaggtgctacacacttttaaacaaccagatctccttagaactcactcattttcaagaaaataccaagggggatggcattaaactattcatgataatcttccctcatgattcagtcacctcccaccagccccacctcccacattagggattacaattcaacatgagatttattggaaatacagacccaaagcaccttagcttcttattgtagattgttattctctgataaaaactggtaccaaatatttttagacagaataatattatgaaagtcagtacaaggaacgtataaaactctgaaaacagatattagatttgtttggcagattggtgaataggcaatggaagtgaatgactctttatctcctgaaggaccaaggaggctttgaagagaattactaagacacactcataccttttaaaaagtaactcttggtcaggcgcggtggctcatgcctataatcccagcactttgggaggctgaggtgggtggatcacctgaagtcaggagtttgagactagcctggccaacatggcaaaaaccccatctctactttaaaaaatacaaaagttagcagggtgtggtggcaggtgcctgtaatcccagctactcgagaggctgaggtagaagagtcacttgaacccaggaggtggaggttgcagtgagccgagatggtggcactgcactccagcctgggtgacagagcgagactccacctaaataaaataaaataaataaaataaaaaataattcttcaaaattcaatattttccaaacttattagaatctacaaggaactcaacaagaaaaaaaaacctcattaaaaagcaggcaaaagacatgaaaagacatttctcaaaagaagacatacaagtggccaagaaacatatgaaaaaatgctcaatatcactaattatgagagaaatgtaaactaaaaccacaatgaaatatcatttcataccagtcagaatgactgttaaaaagtcggaaaatgacaaatgttggaagatgtagataaaaagatatgcttatacactattggtgggaatgcaacttagttcaggcactatggaaagcaatttggagacttctcaaagaactaaaaatagcactaccatttgacccagcaatcccactattgggtatacagccaaaagaaaagaaattatatttaaaaaacacctgcattcatatatttatcacagcaccattcacaatagcaaagtcatgaaaacaacctaagtgttcatcaatagtggattggataaagaaaatgtggtacatatataccatggaatactacgcagccatagacaaaaaatgaaaccatgtactttgcagtaacatggatggagctggaggccattatcctaagtgaaatagttcagaaactgaaaatcaaatactgtgtattcttccttataagtgggagctaaacagtgggtacccatggacatatagaaggaaataatagacactggggactccaaaaggtggaaagtggttgggtgtgagggttgaaaaactacctcttgggtacagtgttcactatttgagtgatgggtacacaagaaacccaaactccaacattatgcaatatatccatgtaacaaacctgcacgtttacttcctgaatctaaaataaaataacatttcaaatttaacttcttttccacctttattaaaggtaaagctattacttttgttttaacactatagtgaatagaattttctgtgttgttttaaataattccgtgatctaagtatctgatgcagagatctttaccaatgaacatcaatggtttttccacaaaattaagatcttttctaagatgaatttacaagggctttgagtgtgtatgtaaaaataagtcctagaattcttttacaataatgacaagcatggcctttcaatttttcaacattctgaaaattgataaacaaagtcatttaccctgtctctaattttctgaagattagattcattagtttaactcatggttatagtttttgtgtcaaccgtattgatgtatacatcaataaacacaatctttcactttcactcactcttctgtctcctccatctccttccagttcctacattattcagaatccttggcaattcatatgtgttaggtgtgaagatatggaattgtcagcatcaggaaaagctattaccttgctacttcagactgagtctttctcttttctttgtttactttagatgatttcttttttttaaagactgagttcttgaattcttattctctgacttgcttcataatccatttcagaatttcttgctcctacactttgtttctttatgaatcagtctgtgcatgagatattccatttttaacccagcttaaatttctccaatgtacccttgttttgctttcaagacagttagcaactctgaattcaagcctatgatcttcttttagaaacctgatctgacagactcctgcaaaattctaccttttttcctggctcttaatttagctttgaaaatgaagtacatactatttatctggttatacattttaaagtagattctaagtgcaaaaaatgtgcctagtcaattcaagttgactcctgattttttgaaaaaacattaagaattgaataacaagaataagaataaatataaggctactgactgaaatgtgatctttctcttattttgaacatcttatttcacaaagttctaagtccttttctatttggcttgaccgcttccatatgatcatggatataaaacgattaaacagaaagttcacattcagcaaatatcaaggtgttcttaatatcgtaacttgaaatcaatgaagaagtcacattttctgctttgtaaaaactgcctcacatgtccctggtctggcaaaaaaatacacacacaagtactgaaaacagaagatgatagcaccagctaaatagcaccattgctaggcataagatttgaaagccagcactttgcagggaaaatttgagtaaacaacctctgtggaaatacagttaattaaatctcgattctataaactgtgaaccaaagtttatataaaagagagactaagaagtctttgttgtaagtattaaaaattctgacataaggaagtgaccactctagccatatcagtgtcagaaaatgacagtgtggggctccaaggctgagaatcagtggggctgcaaaatctggacaaagaaaggcagaacaagacatagactacagaaaagagaacattatctgagcaataccaggctaatcccttggtgtgaagaaaataggagttaataccaaaaacatatggctcattattcatgtaattatgcttgcaagctatatagtaaactatatgtgaaattttcataccatagtataaattcagtcattagtttttccttttcatatatacattaagtaaatatgtattgaggaccctcagatgtctcaggcatggacctataatggtgaaggattcagctttgccctcaaggatcttacaggaatggggcagatggcaaggaaagaaacaataccgtgtggtaagcacagggcactaggggaacaggaagtagtgatctatttatctggatccttgtgggcagaggaaataaacataactaagaacaatgaatgataagtttacaggagggtaggggagaagattccaagtagaagcattgtactaaattttgagtggggcaaaagttcagtgaaacttttatttttattataaacccaccaaagtaaaagttctcagcttacatattatagatagctctctgaactggatgaatgtcagctgtgatttcaatcaagcaatgatgatatggccagatggagtgtgccacctcccttcagcattttgtcttaagagggtttctaatatggcttgtcagacagtatgtgtattccgtgtgttgctggaaatttgaagctaccgtctagaaacaaaggtcttggtctcagcagcattcagtgagttggtgccccccagtaccttggataaaaaaatgtatcctataaagggctccatgaagcacaaatgtaaaaacatgctacaaaagcatctcttcttttcattgtgccacaggggctatcactgtgagtctgacttgcaaagtgcacagcaaagcgaacctgtggtctcactactttgctttatactattgcccactccagcacctgcataaggctgaaggatatccaccaagagaatgctcatcactttgccaactgccctctgtgctctagcccagggtgggcattttttttttctgtgaagaccagctggcaaatattctaggtttcatgtaccttacagtctctgtgacagctaatcaactctgccgtcgtagagaaaaccagcacaaaaccatctataggcaatagacaaatgaatgaatgtggctgtgtttcaatcaaactaaatttgcagaaacatgcagtggtcccaggccatagtttgctgatccctgctctcaacaatcctttaaggtgtggtatctggatcctagcatatgctgtttctgtttcatgaaacattcctccttcatctctctgcctagctagattttagtaattcttcagctattagcagaggttattttttgagggcagatgcctcactgatgccccaaatctgatggtatgccacttcctctccagagtactgactgatttctggttgtctggagacttgctctctgcacttcagagtatgagcttcctaagggtagaaatctgcttccctttctgcctgctgaatccctggcacctaacacacaatgcctgggacatagaagtgactaaatacatatttgtttaatgcttaacaaatgaaattacttacatcttccttactttgttaggatcataattctagcaggtgaaattatttatggtcttatagtttatgagccatgtcaccatgttatcacattgtaacaaagcaaaggtttaactatatctcggctccagtggcattcagagggctgtggaaatcaatagttttagcttcatttagctaagtggagaatgccatttgggcagtctgtgtctactaacaacttggtccacacccactgctctgctgtctcgaggtggagaataacacctctctgtccccatcagtgtcttccactctttttagaagtactgccagcacaatgctgtctatgctccaatgcttaacaaaatttttagtgaaatgttgcttacctttttgatatatcttattatcatcctagagcccagagaagtgcattagattaacatggaatcagaatccgatgtaaccagaataacttccctccaccaagactaatgctttgttactgggtctaaaatgttgggctcagttcttgggaagacttacttcccaggaagctcctctgtgtctcttaggctcacacttcaaggaggctgctcattaatttttcaacatgctcaggtatcactgtgaatcctggccagagcaagctggtaccttgactactcttttttcctcttccacttgcaggtagaacaacaactaataacaaatgtatatatgtagctcactatgtgccaggtattcaccatctgtaagtgatttaccagtagtaacttaattgaaccttgtggtgattctattgcattatctttatttcaccaaggaagaagctgaggcacagagatgttagttacattgcctaaagtcacacagctagtaatgatggagctaggaatataactcagacactctggttctgagtaaatgccctaaacccatgctgctggtgctgtgatagctgagtctcagcctcttcctttctcctacccctaaagaatatacagtcttcattctacccacttctctctcagaatctcagaaactaggaaaaaaggaggggtagaaaacacataacagtgcataacttatggtacagactgagacttgaggggaaatattcagagaccactttagatattaggcaatgctagctctataataagtagaaaattccaaattcaagatattctgagccttgaaaatcatgagggaaataaaaatgcccttgaatggctatgctgctttctctattcaaagagctagcttggaacactaaaaggatgttcttattcactaagtgtttttcactgtttgagtctgcagtggagttttagccacaaataaatgtttttcctaaaattgaaatcaatttgtaaaataatgtagaaaatataaagcctcttgctgtttttctcagtgataaagcagcaggaccgcagcaggaaccaaccatgaaaaatgtggccacctcgttgagctttgcactaggaagctacttcattttcacatacaaggattctccctattccgtgttgcaaataaaaattagtaaattagtagtactaagtttaatgaactctactgaactctgtgtgatacaggaactgacaactatgggtctgaagatattacatccctgttgctttgtgaaaattatctttactccagacttgatagaattagcgtaaacagataactcatccatctttcaatttaaagaccttccttttcctcccatctttttccttttcatcttcaatggttaattctcatttgaaaggatcattcccttcatagacatatccccggactaaaacatgctctttctaacctaaagaaatggtttcttcataaactcataggcattaacatatttttgtaaggtcaccaagagtgacttgttcggggtacctgaaagtcaatatggcgataaactgaagaatcagatttttcttcctgatttttctaagattattgtgggtaagatgaaccatcactttttgggccctagaaactgatttatatagagactagaaaatgttttacatagagaaactaatttatatgcagattagaaaatgtttttggagtttattttcccactagtaaagccaatttttttctatgtaatgaatccattcacctacccatctacccatcagtctacccattcacatgtccatccatccatccattcatccatccatccatccacccacccagtccaatctataattctaaccatcttgaccctttttatattgcttctctgcttcatttttatctttgcccttgtcatcttttactatttgacacaagttttttatttcatttattgtctgcctcacactttagaatgtaaattccattaagtcagaaattccagtccattttgttcatggtgtatccccagcacctagaacaatacttgacaataaatgataataaatgtgagaaatgttgcaagaatttttattaaatatttatttagcatttactacttttaaagcactggattgagtgccaaaaaggatctaagatgaagcagatatgggtctcactgtcaaggaattccaggccaagaaagctatcaccaaaatatattattttaatggcatcattatatagggggcaaagttgttttcatgagaaaaatgaagcatatgtggtatttatactgtgcctgagtgaaaggcttccccaaggaagtgacacatgacattgaataaggggaagtatttgaaaaccgagagttgtagtggaagggcatcctagaaaaaagtgacaactggaattaacaagtggaagtggaaaatgcaggatatgttggagacagaaaagcaattggttcagtttagaggaagcctagaggccagaaagataataatggagaagatctatttggaaagagtggttgggtcagattatggaggattttgatgtcacctgttggcagtagcgagtccgagattctctcgtatctgaacctctctgtctcccctatattataacttttgaatgacaatattttatgcttcctgttctggtttccaaagcagcaatgtggccatcccagtttgctagagcctggaaggattcttgtatgaaatgcaaattcagtctttgatctacattttgtaggtcaacaacctcagtttcgtggtggtaattacagggctcacaaggatgttgttcttgagtaatgaatctaatatattagtcacaaacagtaagcatctcacttcccctactcctccttttggttaaggagcacaaattgtccccagttctttgagatttcttccgggttcatctggagcatggatttctacctttgcaaacatttaacttgcagccctagagctgtgtaataacagatagtattttctactcctagccttatctggggagaacacacacaaaaaagtgttttttattttggcatgtgagactatcgagtgtgtccttgttccataagtgtactttggcaccaggaagcagagacagcagctttcaagtgatgggagaaacagactgattaagagctctgcctgggcagacggtactgaaactgggtgtgtagtccttgcctcatcatttcagtttttttaatgtaaatttttatttttgattgaaaaataataatgtatgtatttatggggtacaatgtaatgttttattatacacagacatgcacacacacgcgcacacacacacattgtattgcagtattattcacaatcgccaaaacagtttgggggttttcatgaaaaaaattccaattttgggtctgttagtatattttatcatttcccccattctcaattctttttcctctaaattcctttccctctcagttaatgacaccactgtcctatctttccatatacccagaattaaaacttcagtgtcaatgggaaaaactggtcataacatcatctattttaattaaatttaagtaatttatttacttaaaaaatcaagatgaaaatacctaatttaaattaccactgaaggctagcattcatttccatggcatggccatttatttgttctttgacttcatcttctcctattattttcactcctatccattgaataaattctgaaatgggaatagtatcaaatgggagtgttacttccacactttgctgggtggagcaaacctatctcctcacaaaagggatagaagtcagtttgcagtgacttccctgatcctaccagccagacatgctccttgcctctcttcttgcctcctcctttaatatttaaaatattttttttaattttatttatttatttactttttgtagagatagggtcttgctatgttggccaggctggtctctaagtcctgggctcaagtgatcctcctgcttcaacctcccaaagtgctgggattataggcgtgagccacggtgcctggcttctgcctttttgtgataacagatggtaacaggaatgacaccacacttatttgtaccactgtcatggctctaatgattatggctttgaagtagcatcatttgtttaaagagctcaggttggtggcccagcaaactcgggttcaaattatgcctctagtgctgacttaatgacatggggcatgtcgcttgaccttgctgggcctgttttctcatctgtaagatggagattacaaaaactttcaaggtccttgtgggaagtaaacaagttaatatatgtaaggcacatgcacatagcctgggacctggtaaataggtgccaagggtagttattactgtggttgttattgttagagtttttgttttacttgtgctaaaaatagaagattcccaaggacagaagcttcgtcttctacaccttgaagggtagtgtttttaataagcaaaggtgagtgtgtgaggtgtcaggtatgagcactgagctgtggaggctttcttgatcttttgctttgtattttaatagatttcttcttccagtatcctgcctcctggtaatgagaaaggggataaggtaacttacacataaatttggttcaggtacatcattttttgtccctagatcatagatatctatttgcaaggatgcaatctgtgatagctaaatgtttgctttgttttataaaatcaagctaagagaaataaatgttaggtttcacataaaaaaagtccttttcagaaagagggtgctgtaagtatttccattctctcaaagcattctagagacagaaaaagtgttttctaaccccttcccacccccaccattcttttcttttggtgcctggtgaagagtacattaaaataggaaggaacattccagagtgctcaattgcctctgttcagggtccacagctgaatttctaagttctttctcctgtggtttatgcagcctatactttgactacttctagttagacagaaggaaagctcacacattttgcagtgagccaaggtaaaagagaactcttttgtcaaagtaataataacacttagcacttatatagggctttttatcttcaaaaggccttgcaaacattagctaattaagaagtctgctcaatgtgcagcagctgttgaaaaaataaatgtgatgcttgggtgtattaaaaagaagaacgaaaacatgaggacatcctatatcaagcagctgttgtactccgtctaatttgtttgcttcacctggtggaatacatcagacgctaaaatagtcctgccccatagagtaataatggttagggatgaggcagagcttgtacataatggaatattgcaagggctactggatatttaccggaagaggaaaaaccaaagaaaagctgcatcgcctaatttttattacacttttataatcatgggctcatgcagcactaatgaaacagacatctgacatgtctaatgacatgaacatatcgtagattctttaagaagaacctatttgcaagagcaagcattctcatttattcattcaaatttactaccaaatatgtattgagtacttaccagacactggagacatgcatttataaattacttggggacagttttgaaacagctgtggctctatcatcttacatgttatttacctattgtaccttaattttacattaatattgacacacatccacccagacccatattaaattcaatcaacatttttattcgttgattctttggcagaaatgagctaatacaccattgcaagagctgagctattattttggtgatgaaaacaaaatttagaaataaccaaaaaatgttttttttgtggttttctgcaatgggcatttggatatggtcctcttttctttttcttggtttttataacaacagtcattgagctatacctgctgttctgttttaaatacctgtttcaagaggttgcaaattccaaaaacttgcaaatttcaagaggttccaaattccaaaggaggtggtacatgaagagaaaagggacagagatcatataatgtcaaaatgtaagtgcctgcatcccattagagtataccccatgttatttatcaaagtttacacacatgcaaggcgtattagaataccttacttccattgtacagaaggagatgggggaattatactttggattgagttgattgttaaaatggggttgtaagaaaaattatttcctcattcaaggaggacaaattataaaagagatagcaaggaagtgaataaagaagagaaggtgttctaggtattgggaaaaaattgaaacagaaaatgttcctagacaggagaaaaatgtctgaaggaattagaaataggtttatttttgctaaggaaaagttacaagccaccaaataaagtaaagtagcaaggagaagccaagtcatgcaaagccaaggccatagttacaaagataaaaaagcatctacttgtcatttcccaagttcagaggatggaacagcgtgaagtgactagaagcccaggaccaacggttgattttcaaaggtaaatggttggggaggggttgactcggttagaaaaaaagtcaatttcagtgatcacaggctcatcctggagcattgcttacagtaggaaatatttggaaataaatcaaatgtctattttttgttcgatcatatttttctgagaagaaaggattgattaaataaatcaggatttattcataaaatggaatactatgcagctattaaaacaaggaagctctgtcactactcaaagctcaaatataagttgataaagcaaggtaggggaaagtgtgcatagtgttaaaacttgtgtgaaaaatatagatccaaatgtgtgagtgcattcatgcatatttatatatgaagagactatagactaactctggaaggacatgtatgaaaatactacagtggttacccctagtgaagggaatggagaaattggaagactaggtagatgctagactcttactttttagtgtatatttcctccttctcccctaaacctttttttttttaaaaaaagaaaacattttattatgagataattatagattcacatgcagttgtaagaaataatacaaagagatcccatatatctttcatccagttttctccaatgataacatcttatgtgaggagtttaatgtcacaattagaaagttgacattaatataatccactgaccttattcatatttcaccaattttacatgcctttgtgtatttgcatgtgtgtgcatgtttaatgctatataattttatcacatgtgtaagttagtgtaaccaataccacagtcaagatacagaacagttctatcacaaggatatctcatgctacccctttatggccacagacagctccctccttctctcccctccttactcctggcaaccactaatctgttctccaaagccataattttgccattttaagaacgttgtataaatggaatcatgtagtatgtaaccttttgagataggatttttatattcagcataattcccttgagagttatccaagttgttgggtgtatcaattcttatgaagggcatgttgttggattgttgtttttatccactctgcactccacaaatctgatttttaattagtgtatttagaccatttatatgtgaagtaattattgatatgctagggcttaaatttgccatttaattgtttgttttctgttcgtttccaccatttctcatgtttctgtttgtcttttcttatcttcctccgggttacttgaacattttttggatttcatgtttatatatttacagtgattttgagtctatcattttgaatagttctcttagtggttactctaggtattataatatacatatataaagtagtaatatctatgtgaattatattccttttttaccttttgggctactttgtcttacctacaagttaaatttaaaaataaataaaactagcaaaccaaaacactcctacatgtatacctacttaaaacaaataaaactcacctctgtacagaaagattgtagacaagaaaagaagtgaaaaccaaagcacttcagaagtcatgcaaagaaatcttgaataagaagaaaggattaaaccaaaacttttagggcatgactgagaaattgaaaactgggggctgtccaggacattagaagcctggagcagagaaagccatgttattgagtatgtaagtttgttctcacattgctgtaaagaactacctgagactgggtaatttatgaagaaagaaggtttaattgactaatggttccacaggctctacaggaagcatggttgggagacctcaggaaacttacaactgtggtgggagggcaaaggggaagcaagcacatcttcacagggcagagagagagagagagaaggggaaagtgctacatacttccaaataaccaaatcttgtgagaactgtaccatgagaacagcaagggggaagtttgcctccaatagttaaatcagctcccaccaggtcccccctccaaccctgggaattataattcaaaatgagatttgagtggggacacagagccaaactatatcattgagtatccaggccttgtttttttatgacctactgcttaccacctggtagacctcatttcatttcttaaactctttaggtttcaaatataaaaggaagttaataatggaacctacctcgtagaattgttgtgaagattctcaacatgtatgtaaagttcttagtgtcatgtctgacacatagacaaactcaagtaattgcaatcatataactgaaccttttcttgagtgtctactggggtcgcaggggttgcaggttacaatgatatggtgccattcctcagaatgagaagatagtgccccagacatgtttatagaccctttgatacttccctcgttggatgaaaccctcttttcagtttctttccactaaggatagatttcagcatatcactatgcttgaagtaaaaagagcttactccaggcctcttggctcttgtccctaccttagactgatggccttggtatttggtatgtgaagtagcagtttggatatggagtacaaagagtgaaaaaaaggttggatatggatttttagactcttactttgggaggatgagaaaaagttctcagaattgataacattgtccctagtagtaagaaatatcatttttcctgtctttctaggcatccttgttgatagatctttggatagaattttttgcagagaatggatgatgtttactttttttatatgtaaatgattctaaaagttgcttttttaaggctgagcacggtagctcacgcctggaatcccagcactttgggaggccaaggtgggcagatcacctgaggccaggagtttgagaccagcctgaccaatatgaggaaatgccgtctctaataaatatacaaaaattagctgagcatggtggcatgcgcctgtaatcccagctactcaggaggctgagacaggagaattgcttgaacccaggaggcagaggttgcagtgagtggagatcacaccactgcactccagcctgggcaagaagaacgaaattccttcccccccccaaaaaaaaaaattaaaaatttgctttttttagtgtttttgtacaaaggatcatcgtggtatgatggcgcttcacacatgcagaatggtcatcttaggctattgtaaccatgtagagagcaattccttagggtggtgtttttttgttgttttttatttccttcattcccaacttttatggtgtagagctctggctccatttcaaatcagcggaaaaattatcatcagacctaagaatgttttcttttgagatggcgtctcactctgtcgcccaggctggagtgcagtggcgcgatcttggctcactgcaacctctgccgcccgagcggcaagtgattctcctgcctcagcctcccaagtagctgggactacaggtgcctgccaccacggccggctaattttttgtatttttgtaaagatggggcttcactgtgttagccaggatggtctccatctcctgacctcgtgatccacctgcctcggcctcccaaagtgctgggattacaggcgtgagccaccgggctcggccaagaatgttttatatttcctagtttctcttccttttgtgggtcctaatcttttgtttaacaattgatttctacttcattttgactatatattttcttttcaagcctttttctccctgcatcttgccaatatccctaaccccattcactctcggcaaactcgcctaaatctcccaccatgaattttagtcccaggttagacttttaacctcatctcccattgaacaaactgcaaaaaatattaatacaaagggcagtttagagtcaacaaaaattgagaacatttgcagctgatggtaccatctgtgcctgtcaaactctggccaagtagttttccatggtggagaaagagagaatctcatgacggcttttggtttggggttattgagaactgagcctgcactggaggaagactagaagagctgggaggcagctctttctctttgtggtgtgtggctcatctcccagaaaaacaggcctctcccagaaagtggtcaaatttggcatctgagacctgagagtggcctcctgtgggtcctttctctcctagcccatctgcgaaaatcaatctgtgccaggtgctccacatggcagaggggagtggtggagtcatgaaaaagaattaagcaaacaaacaaacaagcctcacagagcacacaagaaatttctgaagagaagtttcccaggcttttgatgaggcgaaacaggaggaccatagagcagcagaggaagaggaagggggaggatatggaggttacctgatggcctaattggttccgacaatgcactcctttgttgcagagaatctgaatcatggaagaagcaaataaataaagaaaaacatatggcagctaagtcatatcaatctacattaagaaaaataaatgagaggatattagggagaagatcctgagaggagaaaggcagatggggactcttagaaagtattcttaaaatgggcaggaaatgtgaaaagggactttaaaaagaggattgtgggatgagcaatgaataagtaaaagggtacttaacctcatcactcatcagggtagtgcaaattaaaaccacaatgagataaaaatactaccagaataactaaacaaaaaatgatggatcaaaccaagtgttggccaggatatgcaggaattgaactgtatgacagtgccggtgtgagtgtaattagtgcaacccctgtggtaaactatttattgctattgttagaattgaacatatgcatatcctacatcatggcaatgctatttctaggtgtatacccaggcacaatgagaacatatgaccactgagcatcatgtacataaatgtttatagcagctttattcacaatagccatatttgaaaataataaaaatgtccaccaacagtagaatagataaatatattgtatatgtcatggaacactatgtagcctgaaatgaatgaaatgagaaagaatgaaatgtggatgcgtctcacaaagataataacagaaaaaaatcagatgacctggatgacaaagaagcatagtgtttggagtgttacatgtatttagcacattatggagaaaatagagtgataacttgagttctagtgagctccaaagggatggaatgatatgtaaaaatcaccagaaatttgtttaagccatactgaacctttctataatgagacctaaatagaataaggtactgggtaatgaatgtttcccaaattatggcatgaatgtttaaggactatttcattttaagagatgcagtgtccagaaattgtcaccatggtagtagtttttaaaatgtgttcctcagagctgattggctctaggagtgtgtaactcaggagtgtcatctaccatctgtttatctatctagttaactatctattgtagagaaggttgtggtggagtaaaccaaacaggcagcttgggattcatttgttggggatctgcacaagatattgttagaaaatagtttgggctgctaaaaaaaaaaaaaaaaaagaaaaaaaaaaagaccacttctttagagaactgttagtgtgatgataagagattatagggcaccaggaaaatctagcaaatacagccatctaaccaaaaggcagtattaccatccttgctttgccaggggcaagtgttgatatagacaacatttggaatttggagtctggagtgaggactcctcggaatatgacacttaaagaagcccctgataaaatctagctaataggtagcaataataatattagtaaacatttattgaatatttactattatttagtgatgtctgctatttttatacatcatttaatcttcacaagagcacagaccttgtagtcatgaagtagctgctctcaggctcaccctcccaccaagaagctgaataaattactgtttgtaggaatcagagtacaccaaaatgggctagcatttgaaagatcaagaattctcaaagaaggaaatgcattgaggtgaatgggacctctgtgggttgtttcctgtgatgcatatgcaatacttagaagaggcatagtagcctagatcttacaggaattgcagtgggactggtagatgaaaattcatgttcagggataataagacagccacaatatgagggaccaagattctggagagaaggaaccacagagatctgagccagaattctgcacgtgactttccctgaggaatttgcagatttctacaccacactagcagtgagatactgagaagccaagaagaatgcagtagtttaaaaggccaaaaatctaagcagaaatgtaagcaatcccagagaactgaagagacagaaattgtagttcagagcctcccaagcaagaaggatctttataaacatggcagattctcaattgagaatctgaagagctagattctaatagtatgggcaaactgaacatagaccattctctagtggatcaagataacctgtgtatgttctgtcttccagaaaaaagtggaatcctctatgtaggatttcagggtctaaataattattttacttaccatgtatgataggcaatagaacattaccaggcatgtcaggaaatataaccaaataaatgaatttcttagtgaaaacaaataaactgtaggttattgatatattgggattatcagacagatttcaatacaactatgattaatatgtgtaagaaaatagatatcagattgattatttcacaactggaatctgtagacaagaatacaggggaaattctagaagtgaaaaacttaagaatctaagagatatgtttaatagcagattatgcatagtagaagagttgattagtaaagctgaaaatgtttataaaaataacggatcaaagcatcaagattaaaaaggtgaaagataaagaaaagagcatagcagacacccagtgaaaaatggtgcttctcaaagtatggtcctgagaccacttctggtgctggtccctgacaacatagagtgttcataaatgtttatagcaattgattttgccacaacattttaatagcatattttatgacaaaattagactctaagggattataaataaaaaggaaaaatattaatcacgactagtttcagaaacattggtataacataagtatgttggagtcccagaaatggggaagagaaagaataaggcagaagtaacatttgaatctctattggctaagaatctttcaaaactgataaagcctcaacacacaacttcaaaaggcttcatggaccctaagcagcataactacaaataaaaacttacctaggtacgttagaacgaaactgctgaaaacctaagaagaagaaaagaaaatcttaaagtctgtcagaaaacaaaacaaaaaaaaccaatcttcaaaggaactgtagttcctgaagctgctgccttttcaatggaaatggtctagaatccagaagtcgatgaagtggcatcttcaaagtactgaaaggaagtaaccaccaacttaattctatatcaagtgaaaatatctttcaaaataaaaataaaatatttgtggataaacaaaagcaggtaatttgtaaacagcaaacccacattaaaatattatttatctatttatttattttttttaaagttgtagagacagagtcttgctctgtcacccagtctagagtgcagtggtatgaccaaagctcactgcagccttgaattcctggactcaggcgatccttctacttcagactcctaagtagctaggattactgttgcatgccactatgcctggctaattaattttttttttttttttgtagaggcagggtctctctatattgcccaggctggtcttgacaggctcaaacaatcctctgacctcagcctcccaaagtgctgagatttaccggcattagtcactgcaattggcccccacactaaaatattgaaagaagctgctcaggcaaaagaacatgatcccagatggaagtacagaaatgaaagaagcaatgaagagtaagagaaaggtttaatataaaggagcatatagataaatgttgtgcaaaacaagtaataatgtctagtaagattaaaatactatgcattaatagccaaaaatgcaggagcagggtaaactattaaaatgttgtaaggctcttgcaatgtttcagaacttatgaaggcatacattatattatattctagtaagccaagaattaataatgcaattttaggatgattactaaaaagaataacaaaagaatttagatgtaacaaactaagagataataaatgggaaattttcttaagtacttgataaattttttaaaagccaggagaaaaatataggaccaaagaacaaatgaaatagagaacaactgtgaatgtgttagatttaaattcaaatatgtctgtatttacattaaatataaatggcctaaacattctcattaaatgacatattgcttaactatgtaaaaaataattttaggctacataaagagacatactcttaaatatcaggcacagaaaggttaaaaataaaataatggaaaaagatatactgtgcaaacaccaatgataaagaagctaatacagctgtactgatattaggcattatagattttaaggaaggaaatcatgttaaaaataaaagatgccatgacatagtgacaaaatgggcaatttgacaggaatatttaatgatccgaaaagatatgcatttagtagcacaaaatatttaaagcaaaaactaacgaaactaagaagagaagtagataatctgacaatcatagttggtggttttaatacccttttccttctttaactatcagcattagccaacaaaactatgagtgaagatttagtagatttgaataacacaattaacaaacttgatctaaatgacatatagaactctacatctaaaagctacagaatgcatttttttcaagtaaacataacacctttaaccaaattaatcacatactggtcaataatgcaagtctttaaaaaattcaatgagttgaaatcacacagaatatttcctctgatcagagtggaaataagccataaattaataacaaaaagataatgagaacatacacttaatgctgtgacccagtaattccattcctagatacctcacattcatgggtacatttggcatgaaaggaagtatacaatcatgttcatgcaaatcaaaaataaccctgtgctcattaacagtggaatgaaaaaattatatgtcaaaatgatacatcatatattcatataatgaaatagtgaatgagctagtggtatgcacagcatgcatgaatcttgcagatacaatggtaagcaaacaaagccagatgcagagaatgcataccataatatttcatttatataagccaaaacaggtaaaattaagcgatagtgatacaagttggaatagtgttctgttttccttgtggacttgttatacttcattaacacatgtttaaaaaaaacccaaaaatatcgcaagataaaaaatgcagaagcattttctgggtaaagaaagatgggcaaacattacaaacagaaggaaatttggggggttcaaattctgtatcagtcatgagacttctttcctccaaaaaacttacttttgaacttttaaactctattaacattcttatctattatttattatggaactagatataaccacttatagtaattgtctcaaatctgatttctttccatctatattacatgtagggtagtacgatgtagtggttaaggacacaactctagagagagactgaggttaaatcccagttcaaacatttgggcaagtcacttaaactctctgcatctcagtttcttcactgtaatgtagaggtaatagcaatatctatgtcagagtgctgttttgagaattaaaagaatcaatataattagttacaacagtatctggcacaaaagtaagcactccgtaaatatgtgtgattgctactataattaccttggaggatcggatcattccttatatttgttttaaatccctcgaatacctagaactatacaagcaatcaggaagacgggctttctggacagcgagaagggaagatattttggaaactgactctgttttctctctgtgggtgaggatgagcttacattgatgacaagtttggcttatgaactaggaccttaagtagagctgcataaattagtgtaagtgttattaataagatgggaagaatttgctttctcagttctggcaggaatttatgaccctgagagtcactttatgaccctgagtttgccataatcagcttagtgttctgataggaaaccaaatggtaaatgccaagacgctggggcattggtctcttgtctgcatagtcaccttactttcactaggatctttattcatgttctttatttaagttgggaacttctagcaaggttatgtgtgtgtcgtctacagatatgtaagcaacctggactctgaaagcctatatattaaaaaaaaaaagtttatggattgaattgaattgaatcatactgacttgaactggagtgaatcttgagagatggctaagaaccaggaaggcttagtggcttaacttgtaaggctatgagtttgattcactagatatgtaaattttcacaagacacttaacttttcaggcccttagcttactcctttgtaatttgtggctaataatcataggaaccccacagggttgttgtaagaactaaatgaaaaatgtgcctggtacatgtattaagcattcagtaaattatagcaattgctattattgcggttgctatttttatttctcagccaagaggctcaagccagggtgaatgaattgtgaagctgcaagcttttcaaatgtgctccttccttattttaaaatcctttttgtttttattctcctgacaaccctgagagcttggacagggtaggggctattatctacaggtggcatttgagataataacatagagagataaagtgatttgcctaatgatctcataactgtgggtgttagagttaaacctagaccccaacattccctagagccagccttgagatttttattaattcctgctctatctacctgcttatctcctgataaccagcaagagattattcttcacctctgtgtagaagatttctgaaagaggagtattatccaaattaccagcaaaagaaaatcttatcttttcagatatgatagatggctgacatagatcagtagaggtttttaagagttctaaaaagttaaacatggaagttttattttagggcctggcatcctcacttacccatactgggactcattttacccttaacctctctccagcatggtatttcatcttactgcattcttcttgctttatagtgggctttttccagttctctgcctaacttaatgaagaagattatctcaaagttcccaagattgttacttctcatttcaagctaccaggagagactcagcaataaatttttatattggggattcagtttccttgagaaatctttaagtcaataaccaaaccctttaaatttccttaacaatggtgactgtagggctgtgggaggtgttcttttaccttccctctcggcactaaatgtaagctccctgaggacagggactttgtctatcttcctgcaaaattcctcaggggacagtacagtgcctggcacatagtaagtgctccttacatatttgccaaatgaagggatgatgtcccaactccaaaatttgttatattttaattaatttcatatctttgttatcttttgctatatggatagatttttagcttagattctgtttagatgctttttggtttgattctggtttgggcagcttgagaaggctgtagaattttttcgtgttctagttagattttaaatttcctagctcctcagtagagttttctgcctctcccttggcccaagtatttaagtccccaaatttacttgcttttgaagactggattttgaatgtaaataaatgaaaaataattattttgtcttaataataataattaaattatagcactaagtaatttaggaaattttagatataggtagggtattctgttgactgaggtcataggatattcttaaaattggttttttgatctgagatacagcattctattcttgccaggtcatataaaatagaatttgctactattacttgtatttgatttcccctgataggctattcagctaggccagccttctatgactgaaaaaaaatctttaacaaacaaagctgacaaaacaaagtagtaaactagcctgctttgggtttcaaggtgagtctccggtggactctggagcagaaatcctaagtttcttctgactccttggcctgtctgatgccataagagggtgcagggggagatttgctctgcttctcttctgtgtcaaggcagactgagaagcttttaatccactatatttcaaacagttgcaagtaaaaaaaaaaatgtcatgggaatacccagatgtgggcagataataaccctactttttactcccacttattaatccataagaaggaagggggtgagaaatagtctttggacggtcagctatccatgtacagtagttggatgctgagcccttttcaaatgtactcagaataaaagtgaaaccctactacttgttttgcccattagatagcattatctccatggaacgccaattcatatctctttgtgctgtgtgtggttctcacatatgggattttaataacctccatgctgtgctatgaatttataagcagagctgatagaggaaaagcaccacaggactttattttttcattattactcttttgaaaaacagggtctgcctcatttctgtaaggttctcacagtactggcaatgttgcagccagaggtatagttgttactatggaaaggactaagctctttatttatttgctatctatttttttccagactccctttcccactgctgtcctgcctttagccacctccgtaatatccactggcattgtacttgaagcttcagtgaactgattgcaaggaaataggctccatttgttctctagctctgtggtttatcttacattctgaatgttttttctgcccatccttttaaatgtggtcacatttctcctctgtataattctgcaggtccaagtatcttatttagtgcagtggctaagacaacaggctctgtagtcaactagtcatggatgtgcatgctgacattgctctctgatccttgagaaattatttgagttttgtaaattcatctatatgatggtaatgataaaccttcctcctaaggttggtgtggttgttagttggtatggtgtggttgttagttggtatatttccttttttttttttttttgagacagagtccccctcagtaacctaggctggggtgcaatgatcttggctcactgcaacctgcattctgtaaaagggactaaaggggaggatttaccctaagcttgattgagtgttcaggaaaatacttctttgagaagctgagctctgggctaggtcctgcatgatgaaaaggtatctgcaaaatgggaggatgagcagaagacaaagaatttcaggaaaaagacagaatagtctcagtcctgaggctgagacaagaacatggcatggttgagaaatgtaaagaaattaagtgtggaggctgaccatgactgagatggccagagtccagggcacctggagccacatgaagagttttgaagtttattcaacatggaacagaagccttgttgatttgggggttaacacaagtagtgaagcagtttcctccaggtttcttctaccaaggaatgccagagagcagtgtcttgctttgtgtgattagtgttttgattcattacttttatgggttgatatgtcttgtgagaatatgagatgtggattccagagcttaaaatctgcacgtttagtttgaatgctaattaccacaaatatgtttttaattgataactgtgtttcgacatacttcattacgtttgacctttaagatcatttttaactcatcctctttaaaaaagttctctttgaagaaaatataacacacatcaatggcattttaattgtttacctttggaatatttttgtgttggacacaatttatccatcaaataaaaagtgaaaaaagtcatattttgagaaaataacacaaaatagggccaagtgccaaacatcctaatatatttgttttctgcatgatttattattacgccttttttggtaccatttactaagaatatgtatgacttaatttttcataatagccagcaatttaaggcagcaaagtatttgctttcttccactgatctagtaccgcctatcattgtatcatactgacctttaatccagctcttacacacaaagtcagttatctgtatacttatcgttttaatgggttttgatagatttccccatgctcatttagttatataaatgatttattatttatgtttgttttatgatagtttttatgggttttgttttgttttggtgaagccattttgtagtctaacaaatatttcttaattgggtatgcatgaattttggctaagttgctccatataaataaatgttttgattacttctaccattgtctacagctgttatcatctttaacctccaagttttcttaattttcaaaaggaatttattgaatttaatctgagccagtaagacgggctttgatgttaagtaatagagattagttgcccctctctgatgtctacgttactgaaaaattattaactaccaaactcctgtgacacagtatccttcaaattccaaaacttagctacagtttaccttactaaaatctctgctactggtaatcagccttttagccagtgcagcatatattcagcttttgccagaagatggtttgctcccaagggcttttggctccaaagactaagtgttacttggtggctttggcaggattcagaggagcctggctgctgggaactgacatgctcagagcttgccagccccaaaccattgtgtacctcacagctctcagtgccaggagtttgtgtgccaagaaaacagaaacctgtctagaaaataaactgttttctcttgcacatgtcctctaggaagacaagaagaggttgaacctgtaaattgttttgtggttagaaatgttttaggtttttacatgggaaatataatgctataacttcatatgtaaaacaaaatggcacattatttatgctcctcaaatcattttacctccaattattaaaatgcttatatatatatatgtatttttttttttgagatggagtctcgcactgtcgcccaggctagagtgcagtggcacgatcttggctcactgcacgctccacctcccaggatcacgccattctcctgcctcagcctcccgagtagctgggactacgggcgcccaccaccacgcaaggctaatgtttttgtatttttagtagagatggagtttcaccgtgttagccaggatggtctcgatctcatgacctcgtgatccgcccatcttggcctcccaaagtgctaggattacaggcttgagccacctcgcctggcccaaaatgcttattaatcttttaagtgatcaatatagttgttattatgatgacagtcatttcagctcttgcactgaggcagttcctgtgtgtgaaaagcttctaatgtgagtgtgtgctgtggatgtatggagatcaccccagttgggtggttgtacatgaatgaatgtgggttatgtgggcaggtaatgctggagaagtcagtggaaggtgaattaaccagctaacaaaacatttggataattgaatgttctttagaaacaaatcgtaagccattaggaaagaccttccttccttccttccttccttccttccttccttccttccttccttcctcccacttccctttcaccttccccttccccttcccttcccttccttttcttttcctatagcacataacattggaattgactctactcactttcatccaactatccctacctcttcttcctacttaccctagatttttatttctatttctctaccagttcatattttcctccatctagttttcatcagagaaaattttctgcttcatcaaacacaaaactgagatataaatgtgggagcatatgaaattagagcttgacctacatttagtacaattagtattattctaaggaagtagacagttgtggaaaaatgaaacttggaacacagaaaaggttaaattcatggcgcttatgtagcttattttcattaggcctgttacctaattacttattagaatttctttctatcttttagaccttagtttctcaaccttagcactattgacattttgagtaggataatgcttcgttgtgggtagggggctgtgctgttctttgcaggatctttagcagcttcttggcttccattcactagatgacggtagtatcccccaattgtaacaattgaaaaatgtctccagacattgccaaatgttccctaggggacaaaattgctccctggtgagagctgcttttttttagatccaggtgcttagacaaatgatgatataaatcagtacattaagtagagaaatttttttaaaaatcagtttctaaagactagatttctcaacaacttatcacattatttccaacaacattcaaattcaaaagctgatgcccaatgctagcaaagtatgaatagatagaaagtaaacatcttcctttgcattagataagatgcccagcaatggaaatccctggatttaaagaccttgttaagatgtattatgtcagatgaaaagtgctattttaataactcattgttattcttagcatggatcttttattttagaaaaatggataattagcattttggcttatcactttcccttaatgaatacaaataatttgatagacagacaaccaagagagacttcattaaataatgggattaatcagcctgggactggagtaaattagaggttagacttccagcctgagagatggaattcagggtttggtggcaatgtcatccaattcatgaaggatatttttcttgattgacctaatgttgcagtaaaaaaccagagcaagggtcaactggccaaaaataaaagtcaaaactcagcttgggaagttataggctacactgcatttaacttgcaactggataattgcaagaacacattcaaagcgtcactgcaaagcccttgttgtttagccctagctgcttcaatttctagataatggtccattattaatgtggaagtattagaaagttttccagggaaaaatatcaacctggaaccattcccctttgcatgcattatacacttcactgccatctggttatccataatatccccaaacccctaccaattttccaaaaagaactacaaataacgctttgtatttttagaacagtcttcctaacacccagagaggaaatctattgtgaagttaattttctttttcaaatgttttaaagtaaactattctttatttctaagaaacaaaacccaatgctatgtttaagcagtgatttggaactgtcttactgtcactcagagaagacaggttagtggaatctttaaggccgtggctgtcttttgaagcttatagtgtagtctttagaaagtcttcagaaaagatcatgattcttatggaaggttatttctgtggggcagtgggagaacttagatctgagaaatcattctcatcatgagttagaggaatgattttattcacaattcatactcttcattcattatccaacctacatagaagccttagttctgtgtatccttaagctgcatttgacattttacctcctgatatttttctaagtagcatttttctaccaacagactcaggtgaaaaagaaatgaaggtatcaagtatatgatgtgtacacatttagctttattactagcatcttctaagaaaaatagcaaagagctaaaacgaaaacagaatgattctataagtcctgaagggaatccttctgtgatacaatacaagcaatagaaaggccttatttctccctataaaatgtgtgtaattgtgcttttccttatttaatcacatgatttgtctttaataaacctctactggctcccaagaagtgtggatcctggtaacaagagagtctttagtgcgctgaaggagtgatggttgtgaggatacaagagtggagaaatgagaagagataaactactatactttactaagaattggagagaaacaaagagtctagggtatgtggtttggaagaaataaagattcaagaggggagggtcttcttccatatccatagagcatcttaaacaaagtttatattgtccactgatgctctgtggggtggctttccttttgtggagtatgagtagcagtgttgaattttacctcaagttactatgggatagatagggaggctgctcttggataagtaataaatgcgttgcagaagttaagaaacagattccagaagtagagaaatctatgcagaagcatatagctagaaagtagcagagtggtaattgaacacaaatctgatgacagagccaatgcttccttttattctagcatgctgctagaaactggttcttttataatagtcttaaaataccttaagtctttgagatgagatgaaagtgaaatatgatgaaatgttgaagattgtaattgaaattatacaattacatatctctttcatattaaactttcaaagtcctggtactaatagcttgtattttaaattatgtcttcattgtttaatccatattgaaaatttggcttatgcaaaattatatgcctttgacaccaaaaagatatagaaaagatatggccactatatgataaatttcttatcctctctaataagaaataaatatttagtcccaggttttgaggtgttatctatactttttcaagcctaaaactttacacttgaaaattagtgataaatagttattataggtaataggtatgtattgacaagcacttgcttgtttagatatgatactaaatggttatttatttatttttatggtcaggtttctcaataatatatccattcataattcattggcttattaaataggctctatatttcagatatatggctacagataggagccctggtgtgaggcagaggggggctgtgataatgacctttgtttcagcagtgactcaaggacaagattccaaggctcagaattttgcttttattttctctgtatgagtgtttttgtctgtcagtaaacctgttttgtgaaatgaaacaaaaaaaggtttgtttacattttggattgcctttgcattagcattttatggcaattggtctggtttgacttaaagtcctcttttttcatctttaaagtgtgaggttgctacaatattaagtgcttaagatatgccactactgctctatcaaaattatccatgcaggtcataaattcgagttccaaaaaatgtaaaggaggtcatccttttgggcctccttcatgaggccccagcataccagacctaaccagaatggagtcttctcatgctaagtgccatgtaatcaaactgaacttagaaactagccagtttcgaaaacaggagtttcacagcaccaaatccaaaggtgccctgtcaacctgagctcttatacactgttggtagaaatgcaaattagtatagtcattatggaaagagtatggagatttcttcaaaaactatacatagaactgccatatgatccagcaatcctactactgggtagttctcaaaaagaaagcaaatcagtatatcaaaagtatacctgcatcctatgtttattgcaccacaatgcacaatagcaatgacatggattcaatctaagtgtcatcagtggctgaatggataaagaaaacgttacacacacacacagacacacacgcacacacacacacgcacacacagaggaatattattcagccttaaaaaagaatcagatcctgccatttgcagcatcatgaatggaactgggggtgattctgttaagtgaaataagccaggcatagaatgacaaatagcacatgttcctacccatatgtgggtgctaaaaagtttatgtcatggaagtagagaatagaatgatagttaccagagttttggaagggtgtggggctggggatgaagagaggctggttaatgggtacaaatacaccattagaaggaataagttctaatgtttgatagcagagtagggtgaatatagttaaaaataaggtattgtattttgcaaaatagctagaagcgaggacatgaaatgttcccaacacatagaaatgaaaaatactcaaggtgatggataccttaaatactaacttggtcattccacattctatgcatgcaacaaaatgtcacatggatgccataactatgcacaaatattatgtattaacaaaaatacttaaaaaagaaaaaaagtcccctctgctttaaccctataaggaaagtaactttgaaatgaccaattgggccaggcatggtgactcatgcctgtagttccagcattttggaagaccaaggtgggaggattgcatgagtccaggagttcgagaccagcctgggcaacatggcaaaaccttgtctctacaaaaaatataaaaattatccaggcatggtggcatgcgcctgtagtcccagctacttgggaggctgaggtggaaggatcacttgagcccaggaggtagaggctgcagtgagtcgagatggggccactgcactcctacttgggcaacagagggagacgctgtctcaaggaaaataaataaataaatgaccaatccacttcttattccttgtttcttctttctacagccctttttttcccctataaaagcctacctctgtctgcttagctcattggagcacctttctatttagtagatgggatgttgctcagtttatgaattgctaataaaagccaattaggtctttgaaactaaatttgttgaaatttgctttgttgatgccactattgctctttatcaaaatgatcccatagatagtctatagtcttttcttagtgttttctcccaaatctgttgggaagatactaagaaagttccgtaagtctgaaatctggtcctaaaactgtgtccagtaggtaccattgtattcaatatagcattttggtttaatcttgatcttctaaagtctgagtatgttctttagtttgtctagtttctgcagtcttgtgtactaaaagggtagtaattttcagttagctaattactatgctttacacagttatagggacgaagcattttagaatggcacttcattaaagcagtaaaaatactgtgggctcagtaatctcatttactgggtcaatagcccataatatctagaagaagatttaaagtagtttaaaaataattattcaaacgagaaagggatttcaaactataattaccatagcagtaaaggaatgaatgactccaaagcaaatataaatattatatttaaatcttaatatctgattgctgtaactcaaagggtttagctcttccaatactaaagatcacaagatcttagacctgaaataaacttcagcaagcagccagtcttggtgtagaaattaaattttttcctgaaaaaccacttgtagttaaatatccagactgacaggctttttgcagctcattcttctataagatgctttttttttttttttttctgagatggagtttcacacttgttgcccaggctggagtgcaatggcgatctcagcccactgcaacctccgcctccttggttcaagttgttctcctgcctcagcctcccgagtaactgggattacaggcacgcaccaccaggcccagctaattgttgcatttttttttagcagagatggggtttcaccattttggccaggctgatctcaaattcctaacctcaggtgatctgcccacctcagcctcccaaagtgctgggattacaggcgtgagccaccatgcccggccaaggtgttcatttttcttagagcatttgcatatctcttactcagttttttcccatgtatttgcattttcgttgctattgcatgttagatttcttctactgtggtctgttttttgtattgttttgttttgttttgtttttgctgatgtactgttggcgattttctgtatccatgttgtggctggttaccatttttaattctcctattagttctaatagtttttctctggttgctgtgtttgcaaggagaactactgtgtcatctgtaaataatgattttttttcttctctatttcagtattaatacttcccttcaccctgcctctgggtttctgtgattacatggagtagagcttccagaacagtgtaaaataaatattagtggacattcttattttggttccagtcctagtaagaatatgtctagttaagagcttctagattatgttccaaaccattattccacgagatgttaattgatttcctacaaaaaaaaagagagtcttctaaataatttccttgaactctgaattaaccaaaatgagacaaatctctttagtgaatgggcttttataacctttactatttaatatgcattgacaatctcctagagatggagaaagtatgtgacttttcccaatatatttgtcatagaacactgtttttgaagaacatttactaacatcttataaaacgatacatcagtggtatctttctggtattgttctggtagggtactgttaattgtgatgtttggggtttttggtttcaaaatgatgttctttaccgtgttaagaaaatatcctacttttagcttacttagagtgttatataaatcaaatcttttactatatgctttattctatctggcttttgctgaatataatgttttttatatttactgatgttgtttatttgttttcaatgctggatagtagcccttacacaagtatcataaaaatttgtgtggtttgcaatttgagggagtttaaacaatgctgctctaaatgtttgtgtacatgaaaattggtacacaaaaagaatacatttttataggacatatagcaggaagtagaatttctgggtcatagagcatatatacattcaggtatacagtagaatgctacagttttcaaaagtgttaatgaaaagtttacactcccgtttgttgcctgagacttccagttgcagtgcattttttttaaacactttaacttttaattaacaaaataactcttaatttcaggtaacctggtatatatgcagtaacatctcgtttttaaaattggcattttctggattatgaatgataaggaccttttcttgtgtgtatttgccattggatttcctctttaatcaataattgcatcttatgccaattttttattgttttggctgattttattatctatatataggaatttgttatgtattttgtatattaacccttcctatgattgtgttctccctctccatagcctgcctttcacttttaatgtcttttgagggatagtataattcattttatcagtcttttcttctactgtgagtgcttttctattttgtttaataaaaatgtttcctacctgatggtatgaaaattttctcctgcactttcatcttaaagcattactctattgtatttctgatacaggttttcaattcacctagaactgaaatttgtgtataagtaagggtctagattcacctttttccatgaggttattcagtgtttttaaaaatgtctcatttcctctgcccagtactctgtttggcactttcatcacaaacacttggggtctttattatgttgcatgggtcaatgtgtctgcccttgtgtccacaccatcttgttcctcttcatcaagggcattagctttcttggccctttgcatctctataaaaatgttaggatcagtttgtagagttccatggaagaaatcttgtggtatttggggattttgattgagattatcttgaacctatagattcatttgaggataatttacctctttacaccattgaattttctattccatgtatatgttatgtctctccaaatatgtagatcctttttaatatttctcaataaaatggtgttattttctccacagaggtcttgcacatcatttattagacttattcctaggtatttaatattttgaggcagtaatgaatggcatcttttcttaaatttttagctatattgaaatacaacatatttggattctgatttgtatctagcaatcctaactctaataaaaactataacaaattatatatgaatttttaataccatgatataatctgtagataattatatttttgtttcttcttcaatcttcaaactttttttattttttcatgacctcagtataatattaaatagcagcggggatagtggaaattattgttttattcctcattttgaagggatagcttccaaaaatttaacattaagtattaagtacaatgtctgctatagaatttttgtttagtaaaaacattttatcagactaaggaagtcccttgttgttttccttaaataacagttttaaattattagtcaacattgaatttcctcaaatccttttgctgcatctgttgagacaatcaaatgattttacttttgagatgatcatttgattttactgttaatattgcaaattacattaatttatttttctccccaactttttttgttgtgaagaattgcaaagagttgtaagtttctgaacaccatttttacttgaaatataacagccaacagacaaactatgaatatttagattttggcatttggaagacattttctcaaaaatgaatgaagtgggcctgcctcttcaggaaaataacaatgattttttagaatataagtgagattggggaccaaaagtttgaaaacttctgtcctcttagaaagtgtaatgttacgctgggcatggtggctcactcctgaaatcccagcactttgggaggctgaggcaggcagatcacctgaggttaggagtttgagaccagcctggccaacatggtgaaacctcatctctagcacaaatacaaaaattagctgggcatggtggtgggcacctacaattccagctactcagctactcgggaggctgaggcaggagaactgcttgaacctgggaggcagaggctgcagtgagctgagatcgcaccactgcactccagcctgggtaacaagagtgaaactctgtctcaaaaaagaaaaaaaaaaagaatggaagatacttaaaacacttctaattttatacctcctctcaagttgtatgctattttataattttcattataaaatttcctctttgtttttgtatgatgaagctttactataatgtttacatgtggatttattttacttgagagtaattgagccttttgaatcactgaattctcataaattctgaaaaattttcactgacttgcctttatccattttatctcttctctccctctgagatttcaaataaatgtatactagtccttctcattgtattctgagtctcttatcttatttttttaaatctcatgtttcattctgagtacttgcttctatcttctctttcattaattctttctttagctttatctaatttgctgttaaattcatttcttgagttctttatttcatgtattatatttatcaattatcgaatttctaagtaactattttacatatctgctccatcactttttatagttttcatttccctgcaaaatttttcactagactccaatctcattgaacatcgtaaacattgttttagtctatatcctgtaattccgtatgtggagattttatgtgagtatttttgttggttttctttaatggtggtttgtttctttttatatctgaagtttttaattgtgtatggggcattgtgcttaaaactttatttgtaacagtgatttgagacctaggatgatattatcttcctccagaggagatttttctttggttgttctaggtgtctaaagtcaatagaagttcaggaacacacaataaaattttcaaaactgaggttatcagacacaacaaattgacataaaataggttgacagattttataagactggtttattttcagttcagacttaatcttacaataactctaggaatcctagttcaaagtgaatgtttgtttacccttgggctctggattctgatttctattcttctaggcccaacatgcttccagaaacagagctcacctattccttccagaattactaatgcccctggggcaaaagcagattttagtgttagtgagctctagtcttctctaggctggtaatttcctaccatcttgttaagtcttcgatggtttagagatgaatttatatttttttttgcagctaagttattttccatagaagggcagtctgatatttgaaagttaacattgttgaagtcaaagttctcatgatggtactttttaacaataatgaagttgaatatcttctgtactttgggttttcattttgaaactagaaggcgtacttatagtacagctttcctggagcctatcccatttgcaatcacagacctttaactcaaagtttatgcaagccacattcttctccttattcctaaaataagcctagtcttagaatgtacaatgtaaatatatctctccttgcctccaaggaatgtacataaccccactaagacagtcatgcttccctatcttttccatttactaattttgccaccatttccttccactttcagtgtggaatccagttgctagtgcccatgactatttctcaacttccaactttcagctttcagtacactacgcaccatgatctcctgactagctgctttcttcattcttgcctctgtgttccagaatattatttaggcagaatacataccttacagtagcttcatcacatatctatagtttgtaaattctagctgaaacatcatttgcaatcatttttattctcaactctcttactcaaaatattctttttcaaaagttcatcctattttaaagtctgttaactgtaactcgaagtaccctatctctcatcaattaacacttgcttccttttagaaatataagagaacctagagtgaatctagttgaagtcctttcttataaagtaacctgtttcttctctcattcttgattcattgttcctgtttccaagaaagatgtatttctgcctttccaaagggtaccaatctaactatactcttaaattattgagtcttatcttccatgtattctcactccatcagtggtccttctcttgtatcgtcaatcattccatctttaccaacctcctcctctcaaactataagcccttaaagtatccttcagcccagaaagcaaaacaaaatgaaaaaaaaaatctgtattgagtgaatggcaatgactgttccatttaccactagctttatatgctggcaggaatcccacatgaaaattaagaaaatttattaggtagtatgattttccttacctccaaagaaaattctagccagagaattgataaaacctctaatgctatataattaaaaataactctgtaggaaatagaagttctcatgcttggcactacatgcagacctccagtatactctccatttgctcttcaaaatgtctgacttctagggctgacttcatgtgtaagtgcttcttgtcaatctgttagtatttgaaggataactagaaggatttcctaccccagcatcttccctaaggattcaaatttattgttttgttttcatccctttgatcaaacattatggtctcctctcttattgtttttaattcttctaggagaatgtttctcaaacctaggcatctattggaatcacatgtgggacttaaacaaaattatgtgcaggtgccatcctcagaaattgtctgtcttatttggtcaggggtggactcccgccattgccatttttaaaagttctcctggtcattgtaatgtatagccagttgaaaactatattcctagttgagtgacatgcaagtacactaataccatatagcaagaatcagttttcttaccttctttttgtgacattcctgtgtggcattttagcagcacgtcctgagatcatcctcctgaaaggagaaaaaaataatcaagaggtaagttggccataaaattatccaagttttactgtgacctaatagtaataataggatatgaattattaccataattcacatccatatgagaaaactctttcttggtttgagaaaacgtgttttttgcctcccagtctggagaaaacatgttgcgttcctctggcacatgtacatgtttatgcagatccattccctagaggaacttccaaataaacggagcatattatatatggcaaccgagaaacatagctttatgttgcctgttgtagaattatttcatgacattaacatttttatgcacccccatattaagttttatgcttagatttaatgtcaccaggtaggaaccaaggtaaatgccacatcccaaatccacatagagtcagagctaaaccatcagttatcaaatctgtctttttatgtgctgtgagatttatacacattgctttagaaagctgcattcactggaagatgctggtttgtggaggggcaaggaagtacatttacaggttagcttggctgaactgtgttgatttctctgcagaacagtcttcacaattctttgctcacagttaaaggtctgctgaaagtgactcagtgtagatgaaaacagcttgcttaatcattcctgaaacacgggaaaaattaaaatacatttttttatcaagcaataaaaacaatgccagattgttaatgcctcttttgtacctttcacttaaaagacctcaaaaagaacatcaaggagaataaaggcaaaatctattccccaatgccgtcattatacatgttgaagcctctaaaactagaactctaaagacattcaggaagagcaggggaataaatgacagcaaactgaagagtgcgtctctggagctttgttcaacctgctttgttcaaattcattcaaattggataatgaaaagcaaagatcttttttgtttcaacattaaagtagtaaattagtgagtggtgagttgctaattgttctgtaaagtatttaaggtgccaggagtgtcccatctccaatttttaaaatggcatccttatggttgaaatgaaaggaaccattagagtagtgtaaaacaatgtttttaataatttatgctggttcaattgaaatgattttcatttagaaatactcattgaagttcttgtttttacttgagataagcaagttttattttagacttcaagatatcaaatagaaattcattttccggatggggctaaagtagaaagatagattagagctatccaatgttgtgtttcaaatctggctgtttctacttgctttgaaggtatagaattagcaggtttggttaaattttacttgaattttgggtgaccttttctaatcctgactgtttcataatttagtgtcttgaccttcgttttccatagagccaccttagtgataaatgcagagatttaataactagaaccagttgacaggtgacctttcgtacatggctgttcctttttgctgtggaaaccactgttttgcaagttttattatttcacaaattttaattatttattctattgtctataagcttattcagagagaaaaaagtaaaggttaaatattacattattcttactgattaaaatgtaaagtgcttggcacttgtcccaatatatcactcagaaaggatagggcaatttgtcaggttcatacccaaagaagagaaagggatggttttcccagggtggttggtaaggatgaaactggcctaggagagtgagcaatcacatcagctaagtgaaggtaacagatgtgtgtgtgtgtgtgtgtatttgtgtgtgtgtgtgtgtggtgtgaattttgaatggaggaacagaagggttcttttactgtatgtgtaccaatttaaagagaaaagtgaccctgagtcaacgagaggtgaaacttgccagtcagggtgaataacctgtcagttttggccatttctctctctccctctctctctcactcactttctctcttacccaggaaagaattggttaagcatatcatggtaaattgatttctggaatctatgtcaataaaatatattgtttacaaacaaggaaataaggctgagtaattataaaaatgctagagacttttagaaagagttaagaatatctacactttccccccaccctacagtatcagagaacataggaccttcacagggaatcaattcctctgtacttacattcttcagtatttttcagaacaattcatttgtatgcctctcaaatactcatgcttataataaaataaaaataaaaacaggcatggtataaaaagacccatcgtgtgaacatagtaccccagtcagccattgtcctggatcctcatagaagagaagagccattcatgagttagagacctcttgacagtcttcaatgaacattgattcccaaggacttgcaaatggccactgtgaatttctaaagtgaatttctgaaggaggcttttgggcagtggggaggtattattccctttagtcctggagaccagtttagaaaataatatcatctgccatggtcttttttgcccgacatggacagtaattatttattgcttgagaatctttcactgctgttgtgaaagaaacagtttgaaaagcaaattgagtaagcagatgtgaaggaccatttaaaagctaataaaattggtcatgattagtttatcttagactgaaatttcagccatatttcaagctgaaaatatcaacaaaaacattttcaataattttttatgtcatgctagcactattgccaaaaaggaatagtggtgaagttattgattacaagcatgtttaaagcattaatctatgatttaattaaaataatttaaatataatagtgagcaagatttgaggtatctgcatatatgtatattaagaatagtgaaaatcagtaataattatttctttgatattccacatttcctaatgctgctgtgagtgcatttcctgaaagttaacatatgctcttctttttaacctgaaaaatatctagtatcctttggacatcatgtttatctcaacttcctcaactcagtaatggaaaatgaattaaggtaacttgaaaaatctgccatgaaaattatgtggaataatgtaataaagtactgagaaatatgactgacctgtaataggcattcaatcatgtgtatatcaaaaattctactacactatacttataggtctctctggtgctgtttcttcccttcctctctctctcaccttctacctgtgccccagccaataatcaagtcattttttcctgtaaggtggcaaaatgtcgagattcattttagcagagaaatgacttgttttacaaagccattccttaggcttctaaaacagcatacgaattgactctagttgatcatgaaactctcccacacagcttagcgctgtgtgctgagattaagttcacactgattagaattttaaaattattttactcttcacagtgccttgcacagaataggtactaaataaaaattatgtggttattcaatagatgtcaccaaattcttaactcctcccaagctgattgttttgaaaccagatgtgctggtatagagttagtatacttttgcagaggaaaaaaatagccaaaacaaatacagtgctgttaccataaaagaaaatcaatattttagaccttaaataaaaggaagtgtttgacatttgtggctttctttaacaaggacatagggacccagacagggttggctgaatatttgtggtgctctcagtttatagacacagctgaagcccagtgaaaatattttgaatgtacaagatgttttcaaagatgctttgagtgcacaagagacaagatgaagaagacaagtttgtttttaatgaaaaaaaaaaagcaaaaaatagagacaattcaactataaagggagaattcaaaatttagatgtggcttgataaagtggaactagataaatcttaacaaagttcttggaaaatccaggacctcagtctagaaagaaagagtaactgcctactgaagcagaactgagtgagtgaagacatatggaataaattttcaagcaaagcccccaaatcaaataatatgaatgagttgaagaaatagcagtacactttaacagagaaagttgagatcaaaagacgtagtaataaagctaataagaaaaactgagataactagataagagcagattttgggtcaaattgtccatttgtgcctaggtatttctttctttttgtcatggcatactgtagtttgaaggtgccttcagatgtataaatgagtcccttgggctttgcaagcaagctttttgtgctacctgaagctcctgattatgattaggaatgttccatttgtctggcccccacactcttgtcatactttaaagatggttcctgcaagtaagtggtaaaatagagcaattatcatgttcatccatgtctcctggtaccttattcaggaaggcagatggctaggcaaaactattacccagaagtatagaccaagaagtacaaacgtctcttaagatgacggccatggtgacagtagggccaagtgaatagtcaaacaaaaaaacaaagtggcaattttatagatcaccatctaccctcaaagccgttgcattcataatactctacccaatgacatatttgtcacataaacaagaggctgttgttcccaatgtttgccctcaagttgttagttagctgctgacctcataatctgcacagctgtggcatcccaatgtgttgtcatgaaacagattgtgatgtcttaattgatcactttcagaggttacaattgtcaagtgagaccagtgtgctggtctcacttaattctatattaagccttgttacagcaaaactggctaattcattataatgactaggaaatccaatgtaatttgctgcattttatagatttgaacatatccaagactttctttttcttctttttgattgtttaaatttgtggaggctataccccaaccatgcttttattacacaacgaagcaacttcttggaatagcaaatggaatgtaaccccccgcaccatatgcatcttggtgataagttggagtatgccatatgatacacacaatttaaatcaggcattgatttgcatgactgtaagtgaattggaggactcagctaagagtaatggatgtcaggctctgctgcaagccgtctggcaagaagaatattatgttcttctctattgtgtaaaagaaggtaggctcctaagaggttgaggaagggtcttaaatcaatgcgtgaccccaaagggcacttccttgtgcctccattttggtcactggtgaagtcttcactatggcactaacctataaaactctcttttccaagtgtcctaatacactcattcaccttgtatggatctattcccatctggtgcctggaccacctgctactcacattagttgagaaaccttactgtgttaggggtgatgaacagtccctttaataacagagttttaagacaactcataaatgggcctttgtgcattctgcaagtcaagtttttttcaaaagttttatctttgacatttcaaataaacacatgcctttgtcggtctggcacattttataggagtacaaataaaaatgaaatcaaagaaactaatttaagttaatgtaataactgttagcatccaaaatgcaggaggaagaacaagcatgtttatcaaagcacttttttatagtagaaaaaaaaacagataatagctaaatgcccagcagtaggcaaatcggtacatatggtatatccctataatggaatcttgtgcaggcataaaactatctctaagggctgacatgggaaaggctgatgatttttgattaatggtttctcattaagtaagaaaccaaggtggccaaagaatataaatggcatttctcaacctgtctaaaataatatctatagaaaggaaaaaaatatgacaaaaatcggtgtagtgttattgagtgatgagaatatggagaattttttaaatcattttgtccattctttttagtttttgagtttcccatattactttactaattagggggaaaaagtttttaaagcagtttgagtagtttcaattcaataggctgtaccttcagaatatttccagaacataagcggcttctctccatctcctttgctactcaacatggtccacatcactatcctctcttgctgggattgtagcagcggcctaatctcctgcttccaccctggcctcttttttttatcaactttccacacagttgccaaagctgttaaaatgtaactcagctcagtcattcctctgtcccgagcccttcaatggcgcttcatctcacgcaaactgaaagaccccaagtgatttctcccctgctatctgtctggcctcagtacctacttggctctccccactggctctgccaggctacattgctcttcctattcctttcctgcctcagggtatttgcattggtttttgcatttgctctgcaggaaagcttttttcctaaatatgctcatggccaactctttcacttcattcaagtctttcctcaaagattattttctcagcaatgtctttttctggttactccaccaactctctctctctcacacactcacacacacacgtgcacacacatacctcttaacctcctttcctgctttaattttctcgatttagtacttagcaaaatttaacatattatatgggatgatagtttatttattgcctttctcctgcacccaacttgaatataagctctatgagaacaggagtttttgtttatagttttcactgctgaattctaacccctggaactgtgcctgacacatcgcaggtgctctatgactgctgtgagtgcctaccattgataggaacaatggtctgttacagttgtatgatgactaactggttgatttttatgcagtatcttacctctcagtgtagttattttaattcaattgctttcacttcctaacttaaccaactgagcctttaatgtattccagggactgacgggggaatggagttaaaatgaaaaagataggcattgttctgacatagtttactgtctagtggacagacataattaaacaataaagtccaacacaatacataaaacaaggatagtacccagtcgagagaggctactcaccaacaggcacaataaaaattcaagatcgaatgtcagatgcaaaatgtggaatctcatagaagggagatgagaaagatgtatatcaaaaaagcacattgcttctttattactgttttaaaagaaagggtgactatgtgggagagaagcagcaaaagcaatctatttggttgttttaggagaactgaaagcaaggaataacggaaagggcagtgggcttagagttagacgatctagatttgaatctaacactgcagctttatcatctccaagtcctgaaagctgatgcttaacttccacgagtctctattatctccgtggttaaataaaaagggagaaagggacttagactaactatagagactgtctgtgtatataccttcccatctaaaaggaggcctttccttatccatctaggataaacataaacacagacgccaattaatatgatgacttgagggaatctctgaagggtctctgtaatatttctgctagcctgggacttaccttaagtagttactggttctgaaaatctgttttataacctcattgcttgctgaactcttcatatttttatcaattgctcataaccattcatgcatacaggtaaaatacataattgatccctggatatgtttcttttgcatttcctttatagccaccaaccttattacaaagatcaaatcttttcgtattttcttatttcacctgaaattacagttctgaataaaaatatttatcatttagagtggaaaacaaataactattttttgcctataattttaaaccagggcgtggggattatagaaattaaaattattttttgacggtatactttttcttttttaatggaagcatgctgttaacttgataatctgtggcagcgactgtaggtttggtatttgtaggtacttcagagatatttccatatttggtaattatacaatatatgaacttttgttttcccataggaacttgtttgactaagtggaatttactaatttacatgccttctttctctatttttcagcctttgcaactggactgtgacctttgtgccatagtgtcaaactcaggtcagatggttggccagaaggtgggaaatgagatagatcgatcctcctgcatttggagaatgaacaatgcccccaccaaaggttatgaagaagatgtcggccgcatgaccatgattcgagttgtgtcccataccagcgttcctcttttgctaaaaaaccctgattattttttcaaggaagcgaatactactatttatgttatttggggacctttccgcaatatgaggaaagatggcaatggcatcgtttacaacatgttgaaaaagacagttggtatctatccgaatgcccaaatatacgtgaccacagagaagcgcatgagttactgtgatggagtttttaagaaggaaactgggaaggacaggtgagccctctctgaagcagctttattgtcttttattatcttttatgctaaatcttcgccaattccttttgcaggatataaaatgaacagttatttatttacgctgattgttatatgttttgactattatgattacttgataagccagcctgaggtctcatttattccacctatactacctcctgttctttccattctgattggtttgagtctccaagaaacactggatacttccccaaggtatcttttgatctttttttattttgttccatttgctattgattgagttggatttcagctgaaagaggaagcctaaacatttctgtttcaaaacctagtaatggtaaggaactttaggattatgcattaatctaaactcctctgggaattttgccaaaattttacctgagaccacaaacagaacaggctactgattctccaataagattgtgtagcttcttgcatgcaaataggcactgtgatcctgaacatcataacttggtatctaacttgttcagcagaataccatattgaaattatacgtcccttaaaatcattagcagttgaattattttaaagaaatgaggtataaatactattcattcaattatccaaaaaccaatttgcattttttattacatccatgttttttctgtagcattctgtaaactacacttcgcacttttttcccttgaagcctgctttcccctccccttccttctcctatttcctctgtttgctccatttccagctccctcatctcttctgtaactgaattgtgtgccatgttttctttctttttagaaagataactattaaaacagagaaaacaggaattacaaatcagacaatcttagttcttatatctagcgctaataaagaactgttaagggaagatattgaaaccaatagctaaagttttaaattatctgtgaattttgcttatttgtgcaatatcatggataaattgagcatctgctatagttccaatattagcattccaattttttcaaaatgtatgtatttcactattcaatattatcaaatctaagcttttaactatattgagctatgtgctcagggaggtgcagtttctgatatctctggatgtaatttgaatgctgatgattacttaaaaaccttaggtggatcaactctcctttggtaatgtgggttgatctgaatttaacattttctacttctgagcaccaaaaatacacagcttcatatgaaatacaagacagaaatagccatgaaatactagttcctcggactgtatgagttagcaagaagaatcccaagggtgagatttgaatcaatgtagcataaactgtccaaaatgacaggcagtagagatgaaagggataggtatggtgcttcaaagaaaaatggtcatatgtcacattattctatataaatatgaagcctattcacaaagggctttggaaatttctgatctctccttagcccagagcaatgcaattaatgaaatgtattttggtttttcattagttagagttagccctcagggtatcacccagacatacctataagccctagagtcatttgcggggaggtatcagagaagagcttagcatgctgttggttcatgtttttatgtgtttatttcacattgacttttgccgtgagctttgagggagacaacaccatcacatatgtgtaaattgtaaaagaattgggagagaatagctttgggagatcattttcttactggccatgatgaagaaagctgtatcgtaggaaaattactaggtaattttactcacttgataaagttaatttgcaaggtatcattcgattggtagagttaccaaaatgagagttaaagaaacagaaatatggtttcagtttatggtgcattcttatctttttcactgagtctatttctgtctggttgcttcacttagtactccaaccagacaagagaagacaactatgctagtgttttagaaatggacagaatgggtgatttaagtagagcctggttggataataaaatgttgatcaaaatgacctcagaagctgctgttcccaatctatatcctaaccccatctatgttaaagacttttattgtctaagaatttcccatgacaatctgatattcattgtcaaatttcaaactagaatatatttttcaacttttcatgaaggaaaatgtcaaacttatagagacactagtggtgtaatgagcctctgtataaccatcacttagcttgaataattattaattcatgaccagtatggtttcatctatacccctacacactttctctctcaccaaagactatgttgaaacaaatctcagatatcatataattttatttataaatattttggtgtatacctctaaaagataaaaagtcttaaaatcaatacaataccattgccctacataaaaatcaacaattctgccttaatatcattatatatttagtttgcaaatttcccaattgtctcattgatatatttttcatagtttgttttaattaggattagcataaggtttatacatagcaattgattgatatgtgtcttatatttctcctaacctatatagaaacttccctgtctctccttctctcttctatctccctccctgcctgttgttgaaaaaacctaggcattagtcgtacagagttttccacaatctagatttgttaatcacattcccatgatctttctttttctgctacactggtatttatgtattgaggcttggttggattcatgtcttttttttttttttttttttttgccaaaaccattaggtggttcttctctcagaagaaatactctctagttttctctttttttaatgttagatgccattaatgattatttgctagattatataatgtattaggattgcacaatggtgctatttcatcttatcctttttatttattagctgatatattttattaagagtaatttaccctcttattcatttggttaccatgagatagaaaccaatcctgttctcctctttatttaccagttttaatgtattagtttccttgcattctctataggcgtccactattattaatatttacatattgacttacagacttaaacatacttgaagtattttaatttattaaaattatatccttatgctcagattgccctattttggcctatgggaacctcttcaaattggctttgagtccttttgacatgcccttagtagtctttgatagcttctttgtttcctggtattatggaatgtttcaggctttttttgtacatattccgaggcagacctggattcagacatttctgcaaagaacgtcagtttcttttagtagttaagagagcataatattagcaccattgctgctcattgctactggattggtctttgtttcttgggctttacagaggacagaggtagtatgtaaacaatatatactgtgtatattgtttaaagataaaatcgttatgagttcaaaccgaaactttcaattcaaatccagggctatcaggttttaagtttacatcctctatcttatatctgttccttctttttaccatgctgacaatcacaggtctcagagatttcaatgtaattattcatctgctttattccacaacacacacacacacacacacacacacacacacacacacacataatcttagaataagaataacagcacaacaagcaatataattatggtaaacactttaaggatattttgcatcaaagaaaacatttgaatggcaaacatttatgtggatctgtgctcacaaagtatatgttggtaatagtctccaaaaaagaacatttttctcctaagtaaataggagtgaattaagtggtatacatcactgaagtcatgaggaaatagagaataaggggtgtccatttaattttgctttaactgtaaagctattttgtttgatttgcctgtagttattagaactttttagcaagtagttattttcatcatcaagtttttaacagagagacaatgtcatcattattatgtataatttatagaattaaaaatatgtcactagtagttaaagtgattcatgataggaaaatgattacatggagttcctcaaagaaaactttgcttctcagcttgcttcttaaaattgtaaaaatacttaaaaaaaaatatagcccttccgtttaaggtaggcatcttttcacttttccaagtattgtgggttttgttttttttttttttttttgagacagagtctcactctgtcacccaggctggagtgcagtggcatgatctctgttcactacaacctccgcctcccaggttcaagtgattcctctgcctcagcctcctgagtagctgggactacaggcacgcaccaccatgcctggctaatttttgtatttttagtagagatggggtttcaccatattgaccaggctagtctcgaactcctgaccccgtgagccatcttccttaggctcccaaagtgctgggattacaggcgtgagccaccacgcccggccagcattgtgttttttttcttaaggaattcctcactgaggaaacatgaagcagtagaagaaatatgtatatcatttaaatgtcttagaataagtttaggccaactcacaaacatattggaatacctttttgaagcaaatggaatttaatttgctttctttttagttactgtctaaaattatttggcttgtcaattagacagggtgaccttgtgggaaaggctaagagagcagatagagtaggttgctttccctttctgtctttatcttctggggcccagttgttttttttttctttctttctttttttttttttaattctaggttcattggttagtggtcacttttagattgtcacctaccaatatacttctggaaaacaagtattgtgaattctacagaactttcatttcttccagaaatctttgaaattaaaggttttatattcaaaacaacctggaccaaaataccttttcccctttgaatgattggtatgcataaataatactagcctgctgacatttacacatttgcattaatacatcttaagactgaaatatgatggaaatgctgtagggctgatagtggcacattgtgccacacttaacaatgaagaatgtgatcatgttcctggcacacacatatgcaaaaggaatgttaacttttctagagaagcagttgagagccaatgtgagatattctgctttcctatgggtaggtgggcaattgcagcttggatttcactttagaaatatgcttgcaaatataggcacattatttaattaagtaataattgagaaagcgatagtccccattaaaagagcaaagctaattctgggctgttaaaggactctgagctgccctaaataggtcttaattagctggtgccaatgtggctccaccttcagggatggatgaaattaatgaaagctagcagcaaatagaatcaatatttcaagatgttcctgcctcaggtgaagaggatgaaaagaaagggagtcattttcaaagactgtttaggaaacaatgcacataaatcaatttctaaaaacataaaatgggacactgatttgtgaatacagtatcaagatctctacctggctcatctttgccagcctgttccatccattcccactcaatcttaaggagagaaaaagaaatcagcgatgtgtcattcctcactatctttgggggtgacagttttataagctagcaagggttttaagggcagcccaggttttgctatttcagcttggccattttgaaagtttcttgtgtcattgcgtggtcaagtgtagagatgaaattggctctcatccctcaggtttgcaaacctttagtaatatctagagtggaaaggggtttcaagtcttcttccttgaaaatttgggaatcctcttgtaggtccctctgtcaacacacaaggaagccgccttaacacacacagtgtagcttgaaggtggagggcaaaaaccaaaaccaaaataaaacaactatgctagccatatcttagagtcgccatggggtacagaaatgtgcatagtttgcccgaagaaatgccatacctagattccacaaacaaagatgtcaggttattcctaactcagaataaatacctgctaaccccaggaaaacttcgaccaagagataataggcaaaagacagtattaaaaacagtattttccatttttttttcattttgaagatggtctttgcaaatataagtatctcagcactttttcaggagcaatgctgacaaacctctgttagaatgaattaatatccccatcccagctggtgtatttggcaggaacaaaaagttcatgcagcagtcatgggcagatccataggactccttagtcaaaaagcataatactgcattcagggttgtgttttcacgctaacaagcattatgaaacaggggaacttcctttttaccattatttatgatggcattcagtgacctacattaggcctcctctgtaatacaaatgcgctggaaattaaaaattcaaaaaaaaaaaggaacgatctattttaataatgggaggtagggaagggcatttgtaatttataaagatatcagtacaaacctttcatgtgtttaaaaacaccctcatgtgcacacacacacacacacacacacatatacaaatgcactgggtgaaactctgatgtatttgacaagacaatttaggattaaaacaagagcaacatctcaagttcagtgatcatattttaaagcaaaaagctgtgcaggacatcagtggttgtggaaatcaagacttccaagcagtctactgagtgaaataaagttctctgggccagaggatgacttgacagaaggccagattctcagaaaaaattatactgtatagaaaaaaaatcccagtagacatgtatgctcaacagttctctagatgtagtggcttttaaacccccaaagggtgtgaaactcaaaggcaaaagtaggccttaaatgggaagcttcattaaaatgtatacagacttttaaattttatacaggctttaaagggtttatttatttatgcatcatgggatctatctctgtagttgacttacttctctcttacaattatttctcctctccttagatttttttttgacctatgcctccttcttcaagtttagttcaaaattaagacaagtaaggatagttacattcttgtctttaaaacatatgagccagcagcaatctctgttttttctctattcttggatgcttgactctttttaagacagagttggttgttttgaaaattttcatcctatactacgcccatctgtactactagatgtttaattgcttgggcaaatatttcaaaatacctttcactgtgtctgggatgttataagagctctacagatgtttgccgaattgaatttttgcttctctgtaaacagacttcttattagatatggtattactgacctacatggactcctctagttagctctttttctttctttcttttgttcttgtttgttctttctttctttcttttttttttttttgtttgtttgtttcaaggagtggaaagtttaataggcaagaaagaaggaaaaagctccccgtgcagagacagagggaggggtgctccgagcggagagagaaaaaccccatagctccttttcttagtgaagagtaggtcctctagatcagtacagtgcttttcaaactttaatgtacatcaagccacctgctgacccaaatgatttgaggcagggcctgagaattttcatttttaacaagtttccaggcccggccatcctgttcatctgcagatggcactttgaattatgctattaacaaagtaaaagacattcattttttcttgaaccaaataaatacacaagtcaagaatatctgtttcccaaatagctttgtaatctgcttgtagttggatcctaactttgtgatcctgccctattccttagcaaattaataatggggctcagagaagtccttaagaattcaactggagacttgtgtatctgaattgtgtttatgtgttcatttctttcattgaacaacaacacatgtcctaaggacagggactacacccatctccattttattctcagatctagcatagcggtggttagccataaaatacagtaccaaaagaatgtattattttcactctctgtctttcagttaaaggggccatggatgtttcaagtgtccttaaattgacctcagcagtaactccttttctttgttctattattatcactaccactgctctagtttaggccttctttacctcacacatacgtgactgcttatctagtcctacctctatgttttggcagagatagttccctctgcctaaattgcacttccccctgtcaccatgcacacacatgcaggccatactttatgaacaagtcaaatgttaccttttcatgaagcctcttgtaatatccctacagaattcctacttcccctgaaaatcgtagggttatggacttccttgttatagaaataataactttctaccatgcgttattgttatttatgtttaatctcttcaagtggtccataaactatttgagggaataccagccttgtttctccaagcaccttgacataatgcttgactttaataggtattcagtaaagatttaatgggtgaatgaataaataaatggacgagtaaaagaagaaataacacttaatatcttttttaagcttaaaagtccctttgccattgttgaaataccagtgaatttcaaaatactttttttcaacaagaagggtcacagcaatgccaaagaggcaagttctaggattggattttgatagaaaagtttccacagttctatttagagagaccacgtcttactttactttacccaaaggctggcaaatctattaccttctctagggattttgtgattgggcactgggtttttaataagtaactggcagagccattcctcaaatacaggtttccattttagtttcacttcagttgtgaagcaaattccaaggcttcactcacaattctgttagctgtcagttgcctggtgagaaagcaaatcctagtacccaaagtcaaagttatactcttgggcttcaggaggcaaatataagcaccaccacagaagtcagaaaacaaaatacccaagtaaaggagaactgaaaactctcataaaacaacctgagcttctctaccaaactttaaattgccctccagaaaatattttcttctttggtaacaaagaaaataaattgccttactttttaaatgccttcatgatgaacataaagaaaagaaaaaattggtagttgtgtctttcaaccaactgcataaatgaagaataaatttgtatatagactaagaggaaaattaatgaaagcatttctggcatattcagatcatgtcactctcctgctcaaaatcctgcaatagtcctccattttccttagaataaaaacacgtgtttacagtgacttccaatcacttctgatgagtctaccatgatagcatttaaaattgaaatccttacctcacatacccagcattcccaattttccttaccttgttctattttatttttttctcttatagcattaccttctaacattctatataatatacttatttattttaatttttagtgttttctatgtatttctcctactgggatatgagttctctaaggccaaggatcattgttttgttcactaatatatctcaagcacctagaagaatatatgttgtgtagtagacactcaatatttgctaaataaatgacctagaggtggaaaaacaattgaataaaggattcaggcaaacttgcaaaaagttatcatgggggtctttaatcgcttaaagaaaaaaatgcatccactcagaaacagtgcaattaagttacaagtttaaggctgttttttctgctgttgttttacaaaaaggtgctagtattgaagctgtcttatccaagagatcatcattgcactcaaggaactggtctgactgatttttattcttcaacacatggaccagttgtttaaacagaattgatttctgatttctttggtatccaggggaaacagcaaaaatgtctcattcttatttggattagtagaacagcggttctcaaacgtgagcttgcatcagaattacaaggggtgctgattaaaacacagattgctgggctcattcctggactttctgggttggtatgcttggattgaggcccaagagtttgcatttctaacagaattccaggcaatgttgctgctggtcctgggatcacacttcaagaactaccgtgataaagaattctaagatatcaagtcacattcaattattttgaacatttggtcctataatctttattctattggcatattgttgcacgaacatctagcactatttttgttatgatatttttcacggcgaggagttttttaacctcctgtgaaagtcctactgcaactctgtcattttattcttcactttcttaagatcttgctcctctgtaattataccagatggtgctgctcagtagcttataagggagtgatgcttcatcattctagacagagagacaaatcactctgttctctgacttttgaatcaagaatcaacatttgtgtgtatgttcaacctgctatttgctttgcaattttgctcattaggtatttattaccctgacagtgtatgagttagtcattttccttctgccgtgtagttcagattagcactgtttgacaactgccatcatcacagcattacctccaataatatgtaatttcttttttgcctatgttatctgggtgaggtagttatctaggaagtatatctacaaacggaagatcacaaacagcattcagttctctgacttatcatgttagaaatggataactagggccatttccttggagtttctagccctgcgattggcattgctgaaaagaaaggaatattatgaccaaagccaagcgttctttttcatttattgtatgctttttttatgaagaaggtggtatgagggaagcatacaatttaatgagaagcattgaaaaagaacagaaacatttattaagctctactggcaaaatggataggcaaccctttacagaaacatggaaaccatgcagagcagagaactggttaaaatttagaatgtggaaaacagtcttatctgagatattcaacaattggagcaaaaacatattttctttttctttataatcttcactaaaaggagaactaaagttattactagataactcatgcaaaggcactattacaggcatgtaataacattcttctgacgtgaataggttgtttattctctcctaaaatacttctctacacagttttaatattaaacttatgaaattttcttgaacttttgttgattggagggtagtagagagagaaggggatatagttgggagcttttgggaaggattgtcaatctatcttaattcttctagttgatagtagatttttgaccattaaatctttactaacaaaggtgttaatatcctcgtaatgaaatgagtgtcctacactacatcagctgtatcattgtggaggtacaaaagctccgaaggtaaatgcaaaacaaagaatggttgctattccaaggtgactttttcatgacatgttctatatttctgatatgtcttctagtcttaacctgtgagttcatagcaaacacagttggttttatttaggagtgcattaaattttattccattgagcaaatttcacttttgcttcatagtgattgtaattaatttgctctttatcttctctttatctttacttcactcattactcatctgacagctcgccatcccatcttaattgggagagaagacccttccaaaagtgaaccattggcagttctgtcatctggaaagagatacataaaatgtgttaagaaacagaaatgactatataactggttcatcatatttccttagcaggtggattcttggtgggcaaagatcatgttcctggtgcttttgctgccaagcacattgtgggtgttcaataaatattaaataataagaagagtttcctaattaagatgaacatttttctctattaagcagatggtgctcaataggagtaacccattatttataagtatgacacaaggtgctggcaattgttgaggaaatgtggctctcacttcagatgctgattatatgttaaagcaaacttttgtgacaaacagcttggtcgatattagttaatgtttgtgattaaaactgttactaaagatggacttgtgtatgtaggtctgtaattctgctgttttgattcttaatattggcttcacctattcaagtatttctggctatttgatgcaaggcaagtttgggcaaatcagtgtatacctgattttaccccataggttcaccatttgatttgaattctcatccttgtctgatttctaaagagatttttgttttgagtcctttgagtctctttgtggttgctaaagctagatgtgaacacctccgtgatatttgcaatgcttatattcgtagctgaaatctcagtggaactaaggagagttaattaggcattcccaaaaatacacatcgttttatgattttgcagatcaccccgatgaaaataacagtttaattttgtcaagtcatgtaaattatagtgagagggatgatgagagttctcagctctttggagaagttaattttgttgtcagcacatccacatttcaaaaatcacaaactagaggcagaacttttcagtgccagtgagatttggtgatcagatactgttttcatttctaatgtctgccttctgtatagcgcctatgcaaataggggctttcaaggatgcaaaagtagcaacttcccctattaggagcgtaactagcagctgctgtgtttctcataaaagagaaaacatcctgtttactaacatacaaccatacgccctcacccgcgtacactcacaccaagctctttttttaaggcagagcttttattttggtttgagataggcagcacagaaatgcagtcttttacaaacattccttgagcacatatcccctgggtgctaagtaggtgtcagtcattgttctagatgtggggaatccactgatacttgaaacacattctctaattttactgggaactcgtcggaacttctgacattcattggcaagttctttgcatctggtctcacctccttatttttaatatttataaaccatgttcatcaggatgtcagtagagaagaaatgaaagtagctgagaaaccttgccgagagagaccaaatctcaaagtgaactaaaaatgtcttgaccacaaggatagaaagtgaactaagatatgttcttgaggcagcaaaaataagtattgtgccaaaatccaggctttacctcagtgtcagataatcaatggactagagatttcactgtgttgcccacagccctgttaagaaatcaagaccatgtgctttgtctataatcctggagtcagcccagaagatgagctcataaatatgttagcttaagtaaagtttatgataatatagacgatgaatcatcttcctgttttgaaaagcatatattctataactcaggatttctggagtccctccagaaatctacatgacttttgccccattttctttaggtcttgattcaaatgtcgccttataagagagcccttttttgacaacactctcccacccccaactctcccttttctgcttttcaaactctattttcctttatgttacttgttatggcctgatatgtgtttgctattttctgtcttcccttattagactgtaagcaccatgagggcataacttgttgtttacctctctgccccctcaaatagcatctgacacacataggtgacactacccagttgttgagtgggtaacatgaggttgtttgggattgttagttcattatcctaggcctacacagggtcagcatcaccaatatcgctgtcttccaccttcacatcttgtctcactggaagatcttcagagacaacaacatgcatggagctgtcatctcctatgatagcaatgccttcttgtggaatactgcctgaaagacctgcctgcagctgttttacagatatatatatatatatctgtacatatatatatatatagggagagagagaaagagagagagagaatgccctctaaaataatgatgaaaaataaagtaaatacataagcctagtaacatagttgtttattatcattatcaagtattatatactgtacataattgtatgtgttatacttttatatggctggacatgcagtagtttacctaaaccagcatcaccacaaacacatgagtaatgcgttgtactatgatgctatgacagttacgacatcagttggctataggaatttttcagctccgtttataatcctatgagaccatggtcatatatgcggctcatctctgactgaaatgtcactgtgtggcacatgattgtttaactttcatgagagattctgataaccaggggaacattgaggtgatataatttaatccaaaaaagtagatgtttcaaataagattttgtattgggtaaataaatgattactgtttggctttttggaatttcatgcatagctcaagaatctctgttgccaacttcatggtctccttagtggtacagagatctcagcaaagaaactcagaagtgagcacaacacacttatttaatgggtaaggaaacctaagaccagggcaaatctagtgactttctcaagtcccacctcttgtagtgaaacttcattcatggggtcttatgaatcctaggctagtgtcatgtttactggctcacaaggactgccaccattgaattgagcaccaggttgagtatttctcaaatgtgctctggggaccatctgcttcagaatcttctggagggttctgctagaaacatagcctctcagccctgtggattcagaacctctgggaatggctctgcatttaaacagttccccaagtgtgtcttacacattcctatgcctggagaaccagtgacccaatatgtgcaaggattcttgattctcctccatggaaaaataaaaaaattaatcgtatctccaaactatatgagtacatatctatcgagaacctggaccaacagtttttcttggggagggacactggtccatattaaaattaggttagttttaccatcaagttggataatatgagctactttgaacttttgggcttaaatctatctagttcattaatttctgccacaaaatttttaagtgcacattgccaggaattcagagataactgagacaaccccattgcagttgggggagacagatatagtttcacagggctacagaaaagccccgaagggcctgtcttgtctccatgtgagacctcagaaccatgtaatgcaaccaaccttagttgcatagtaagtaaccaaccaggtgtgtatagtaagctgcattcctaaatgtctttctatagttctggacatctctctaagtccaccaaatagtctcagtcttcacacaaagaatagtgaggagatctgtttattctcagagttagtggacaaaagcaaatattctattagatgttattagtattattattgttattattttcaggacctacatccagccccttgttgccataatcgctatccaatcacactgcccttttcctttgttataataaatttctcccactcttcatcatctttgaggatgaatcatacggttcatcagcatcttacttcctgacatacaaccctgaaattgaacaattcaaaaaatttcccagaaatgactttgtgggattttaatctaattctctgaatggtgaaaactctttaagacatttttcaaaggccaggtttttaaatatttcataccatggaaactgtcttaggaaagagttggggacttaaggtcacaaaaaatgagaaaaattatacttgagaaaaccttgtaaactagaacttcttgtaagaatattaatatgttatttttatccatcttaaaatttcctcaggcgtgtgctgaatgagcctacttcatggttgtagttttgttgttctttccacgttattttgcagttctccctgtggccatcatattgattttaacactgtggtcatcattataggaaaatggaggcattaataacttggtctctgtggacagattgtaatagaaaaccttataaataattgcccactaatgggaaaattgaaaatatgcactgtattataatggtcataatgtaatcattaaaattataattatgtgacaatgaaagaactcattatgcattagtttatctttacataatgctaatagctaatgaaagtgtgacaattagatctaattaagtttaacaacatttctgcacttctcgtaaacaggctatgttttgccagaaattgtatatgcggagacattagtgataccgaggtccatctcatataatatgagttttgaaatgtaaccatcagtcctatgaagaaccttaactttataatgcctttttgttaaatgaactggaagtatgagtctttactaagggtagctttataaaaaagtttctcagattgtgtcatgttttagttaaaaataacaattagtccttcctcttctactaatctgtgcttatatatttgtgtgtgtgtatgtgtatgtatgtacttgactcatctgtgttttgtttttaacaatagaattgttatactgaattctcaagttagaggtttgattgattgatgataatgaatcaagtagatgttggtttcttgtcatagattatagcatataacagtccaccatgtcctatctgtatgatctaggtcaagtgtaaactctctgtgcttcagttttctcatgtataaagtagtgtctatacttttgttagaattaaactagaaatttataaatttcttagcctgggcatagcacatggtgctagtatttactattattagtaggaattattttatatctatatcataatatcaagaagaattccagctagtatcacttttcctccactgacattttattgcattgcacatttagataatcatccagacttttatttttccatcatttagaaaaatcattacatacatcatattgaaaacagtatagggaccttcaatatgtgctcaacatattcttcagagtggagttttaagactcttgagcactggaagacattggccttgtcaccagggtttccaactgctcaggtttcacttacagaatgatagactgtgagctcaactatgaatgactcttggccgctctcatcagtcttggatcatcaggaagcctcagaaaacagagactgttcaagtaaatacaggtagaaattggcaaactcagtcacttgctaccatgcttccaaaaagccatgatactggtctttacttttctaccattccttttattgatatatgttcagtacaaatgaaacattctctccccaagaggactcattcacttccataagtcaaccatcactgctacgtcttgtctccatctctgctatcacttctaaacattggtctctaaaactaggttggcctttaggcattttctgtgtgaaattcaatctgtttaaatttgacttatctttcctaacgaaaatgtaattgagttaccaagtccacagtcacttacttcaaaatattctttgattatatgctttgtttctatctcgaggctctcattgtctcaggtctagactatgaaaatagtctccatctattctcactgctttccatcttttgcccttcaatctgcattttatacttccaccagattaatcttcctaaatcacttttacatttcattcacctacccacaaaactctgatggttcttcattgcctttagtttcttttatctggcattcttgtccctcaaagaattttgtccagcaatttttctaagtttgttgccaactagtccctacagttgttctctggcccaaccacatgggtctgctcgttatctccagatacacattctaagctttgcatctttgctgaccctgtttctcagctgaaatgctgttccttttctactcttgtcaaataaatcatttaaggcatagctcaagagttgactttttccatgcagctctctctaacagccccatttatccctccctcctacgaattcctcaagcatttatttttctcgccctgtatcttgcacttgtacaggctagtttggctgcttcttatcttttatgtacagttccagctggccaatgggattggcaatattggaagcccctcaaggctgttttttcatctctctgtgcagagttctcagtgtatattaggtccttaacaaatatttttttatgagagtgtcaatttcgtaagcacttgaagatagtactaaaaagccttcttgccacttggttctgcctggagctgatttcatacttacaaagtaatgatttctgagccttctgcttatagaaatcgtgtaaagcctcttggtagaatgaagcatgatgccctctaccctgaactcaaagacctttttgggaaagtattattttagctgagagtttaagggagaggacagacagattcctgtgatgcagagatcagcatcacagccctggcagccccctcctcttgctgagaacagctgtttcaaatgcccattttagaagggcccttaactttccttagggctgctaagagcaagttctggatcacctgtagctgctgctgcttagataaccccagaaacaaaagcaggtgaacactgggtatgcttgcctcaactttgccactaactagttaagcttgggaagccagctcacttccaacagtctcaaatgctttatctcctctgccctaaagtgggtgaagagctccagaattaaaatttgataatttttactttatttttaaatcaaaggtagctgaaagttgaattttgattaaaaaaataaaattcaagacaaatccacctgaattttgtagctcttcatttcatagatgtaaatctatcacaaattatcattctgtctttctttctgtctctcagttcctctccctttctgtctctctcatacacatgcacacatatacacaaaatattccataaaatcagtttttaccagaaatctctttcatgctggttctcctctatgtagaaagagctacaaatgaaatggaacatgggaatagaacaagaagctgattctcttttaaattgccttatttgttttttctttgggaagtccgaatttttgaagacttaatacaaccctgccccaatataaactgtctctcgcattattaacatcccccccgcccagagtggtacatttgttacaactgatgaacctgcagtgacacatcattatcccccagagtccacagcttacattaggcatcactcttggcattgtacatacattctatgggtttatacaaatgtataaggacatgtatccaccattataatacagaatagtttcactgtcctaaaagtcttctctgctctgtctattcatccctctctctcccctaacccctaacaaccaataatctttttactttctaattgttttgccttttctagaatgtcatatacttggaatcatacagtatgaatccttttcagactagattctgttacttagtaatattacactcctttaaatttcttacttattacacccatttaaagttcttccatgacatttcatggcttgatagctcatttgtttttagtgctgaataatattccattgtccgaattgtaccacagtttatttatccatttatctactgaaggacatcttggttgtttccaagttttgtcaattatggatagagttgctataaatatctgtgtgcaggtttttgtgtgcatgtaaattttcaacttgtttgggcaaaaaaaatgttttatgttatacgctgaaaaatgctggctgaaatatgtagctaagttgcctttattgcctttttttttttttttttttttttttttttgagacagaatctcactctgttgcccaggctggaatgcagtggcacaaacatggctcgctgaagccttgacctcctgggctcaagtgatcctccctccgtagccatccaaatagctggaaatacaggcgtgtgccaccatgcctggctaatttttaaattttttttgtaaagacagagtcactccatgttgcctaggctggttttgaacttctgggcttaagtgaccctcccaccttgacatcccagagtgctgggattacaggcgtaagccaccatgcccagcctacttttgtattctcttataatgttgagtgacttaccttttgggagttatagatattagatacaacttgaagtctttttccttcatttgtaccatcaaaagatgttttcggtgttcaatgaaaattgtttcaaaaggaatttggcagtccccaggcttctacaggcggttttgaggatgaaatgtgggggcatctccattctcattatgttgatttctccttgtgacaaaaaccttttgccaccccgcctgcttcccctcttgtgctctgtcttttctctcctctttctttctgctacctgctcactctgttttctctgtatctctttgttctttctcagagctcttgcctctgacacactttttagtgccatcgttttttgagacagcctgatttgatcactgtcttttctctctccctttgaaagctttctctgttctgtgtatttcctagattactggtgatacttgtcattctggttagattttgttcctgttttgatttcatttttccgtaagatttttgtttggttgattttttttaaccttaagaaaaaaagagatttttttacttgcattccacttttctttctgttctgctctgtaacgtgagtgtgcaatatgctctaaagtccaaaaggatagttaacacagtgggtggtggggctatgcataatttctgccatctttcttatagcattctgttttctgaaattgtttcatggtgcatatgtacacataataagaaagaaaaagcaatgaaacgatttctattttgacaaggaaaaaaatcttaatgagagcctggctttgggtcttgcctctagctctccatgaaacctttttcttatctgtcttcaccaccaagcataaccacaatggctggctgagctggagatggacagcagtctgtggggattgtgtaagtgatccaatggttagctggaacctaccaaactgcaagtcatgggtcacttctgttgattccccaaggctaggctcttactgtcaattgttactaaatggaaaaaaatgcagagaaatagcactgactgccttatgaaatctagtaccctttgttcaatatgacaattagttttgaaagctgctgatgatagcagacaggggtgacatgtgataatgcttattcattatggtagcatcacactgtgattgcagcgtttactttttatctatttattcattcatttatttattttagcattcttattgattgctcttactgattactgcatgctcatttaagttgcatgacaaatgctgttatttgctcactcctcacagaaggcttcgaaaagcaaaccatggcaggtcacccagaaaccaaggtggcagggcactgaataaaatgcagccccccagattttcttccaagtggtgtaatcgtaaacatgggttagctcctttctaaggtggcaggaatcaaagacagaggtaataaactttggccagagaggaggcctgtttttacatgcttgtaaagttgtttttacatgcttgtacaatggagtgtttaaattcacagtccattgtgaacataggcatggtatttcatgactataaactgtcatgttttaagcactttggtctgtcaggctaactaaatataagcccctgtcctaaagaatcaagctcacatagtatgacaaatcagcattttatttatttgtgctaaaagcatttattgaacagctgtgtactaaaaatcctgcaacaagaagtaacattgaaatttccttaaagagcttcttctactgaggaatgtagacatattaacaaataaatacaaagtaggattataaaaaagtattttagaagaggtagctatttacaggatagagtaaagggagaggttaaagttaaaaagttaaattaaactattttttattgtcatatgaacaaaagtatcttcatgttaaattaaatacaattagctgatatttgtatgcatctgctttttatgagctgtcactagaagatgactttttactgcctttttttttctctgttttttttttttttttttttttttgagacagggtttcactctgtcacccaggctggaatgcagtggcaagatcttggctcactgcaacctctgcctcccagattcaagcaattctcctgcctcagcctcttgagtagctgggactacaggcatgcatcacgaggcccagttaatttttgtatttttagcagagacggggtttcaccatgttggccaggctgatctcaaactcttgacctcaggtgatccacccaccttggcctcccaaagtgctgggattatatgcctgagccaccgtgcctggccaccattttatattttgataattcatatttagtactctcagtcacttagttactcaacatctgagtttctttatctataaaattgacttaaacgtctatgtattcaatattcaaaaagtatattggttaggaatattttaaaatatacaacaaagaggtgactatggaatctaaaatcaatttgagaatacatataaagttaaaggtattataattcttattagcttatatgtggggaaaacaaatgattaaatatatgcatgttatgaaagaaaaatttatgaagtaaatatgtagaagctgcaaatggtgagaataatccagtgtctcctttttgagaaataaggaatattctttttcatttgctagagcaaaggttaaagaaagttttaaagacttgatattcctgtatttggatagatcatagataatcattgtcctgaatgctgagtaaacaattgaatacatctaaaaatgtgacatgcattatgctgagaccctggtagtactctctctgaataatgttatttgggcagagctaaaatgacttaactgtaattcccctaaaattaatgtttcttttttctttctgaaaaagtagttttcataggatttagacaatatttcagcataacttcaaaataataataaatttgatgtgttcatggttgcattggtaattagtttcagctgataaatatctgtggctcatagagaatagcaaccaacaacagacctatccccttatgcttcaatcttttctttttttatttttttttttaatgttttatttccataggttattggggaacaggtggtatttggtgacatgagcaagttctttggtggtgatctgtgagcttttggtgcacccatcacccaaacagtacacactgcacccaatttgtagtcttttatccctcactcccttcccaccctttcccccagagttgcttcacccttttctaaaactctttaatatggagtaaaagccaaaatcactttttttcatttttaaaacacctttgaataaaatttgtaatccaatctcttttgtattaaagcattcgaatgcaaaaagtgtaaattttgtctgtgtgtgtcagtttgcaatttcctaaactcacttaagctcaaattgctaataattaaatgagactgagttcgaagatagattaaaggacagctgattgaggatggcagtaattcctaaaggacccaaaagttcatcagaatatcacatttaggaaactgctggtcattaaggtgttaggttgtgaatttgagcctcaatggatgctgctttcttttagaatgaattaccaggtggttattgaggtatactgagtcaggattttttaatttaatgagtgctgtgtaacacttaagaaatcaaggccaacatttttattttttacctgtttgtggtgcatcagccattatttaatacattaaacattggaaataagatcttaaccaaaaatacagattttaaccaaaaacataaatgttggggctttttaaagcatttaatgaatccttagttttgtaccaggtaccgtgccaattatttttcttacattatatcatttaattcttacaataatttttccttcatgaggaaaaatatcctccctccccttacaaggaattgagacatagtgatgctgtcttgaatgctgggtaaataactgaataaagtcacattaagtagagtccaaacttagcttcatttaggataatattcaacacatttggggaatttttttaagttgttcccattttgaaaactgacataactataatgtcatcatcatttttaggaaatgaaccttggcatatcctaggaattttgttttcaatctccaatccaggtggcattctggaaagtggactgttactctgaccagacattcagcctgggtgagctttgctgtacactcagctgacctacttgtttaagggtttttaaaactcctgtgttgacaatagtaagcgtgactcccctctgtgtacctgtgatcaactgaatgtacaatattacaaaataagggcttcttcttggtttctttatgttttttccttaagtcttcacatccttaaaggaaatgtattttataaaattaagtctgaacgagaaagcaaagccccatctaacagaagagatcgtgtccttggaagatgatttcttcatctcagctttctcaggtctctcgagatatttattcatagccctcctatggaaacacagggttctcaatgtgagcagctctgttaggtttcatgtcattgcctctcagcagccctgttcagtaagattttcagtgtctgattgttcttataatcaaatgtgcttttccgatttccaaggtaaatttgctttctaataaatgtaacattcgttggtgcccaatgaagtcttttttttttaacttgtcaaattacttagtacagaaaaatagctataattcttttctttcttttttttttctcttttttttttttttgagacggagtctcgctctgtcatcaggctggagtgcagtgacatgatctcggctcactgcaacctctgcctcccgagttcaagctattctcctgcctcagcctcctgagtagctgggactacaggcacgcaccactacgcccagctaatttttttatttttagtagagtgggtttcaccatgttggccaggacggtctcgatctcttgacctcatgatccacccgcctcagcctcccaaagttctgagattataggcgtgaaccaccgtgcctggccaaaatagctataattctacattaataataatattaatcattttgtttcatttggaacttttttcaattttgcattttctcaatttcttaaggtcgattctaagaatttacttggtaaatcacaggttctcaataagtattttgaaaattaacgtcaaaataaaaagaactgaacactccaggtatagagaagggttcatttaaacttattttctctaagatgatcgatcttctacattttttaaatgaaatgagatgctataaaacaacatattctgactttttttttttttcagtgagacagagtctcgctgtgtcacccaggctggagtgcagtggcgcgatctcggctcactgcaagctccacctcccgggttcgcgccattctcctgcctcagcctcctgagtagctgggactacaggcgcccgccaccgtgcccggctaattttttgtatttttagtagagacggggtttcaccgtggtctcgatctcctgaccttgtgatccacccgcctcggcctcccaaagtgctgggattacaggcgtgagccaccccgcctggcccatattctgactttttaatagattacttaattatatttaattcctagaaacctcttcaacatccttgtatgagattcacatctgtaggttctgcctttcttatataaggtaggataaaatctttttattctttctcttccattcttctctttttatatcttttggcaccttgtgctctaatataagaacactttaagcttctcttcttgcctttatgctcctgaatacgttttcttctacctataattccagttcccatctcacctcctcagtacctctcctctgagccaaatctggtgtttccttgatgctcagaaatggcacctcctccacaaaccctccctgctatgcccatgtctaggcagaatatttccttctttcctcagggctgttacctttctggagtactggacaggatagttattaaaacaaatggttttttagtcaaatggttatttgacctcctgaccagctagaatgtgagctttctgaagagcaaggggcagttttattctttttgtgtctgcaacactatgctcaataaatattaatttggaagtgagaaaagtgatgttatgatgagttaaagttttcatggttcactttttcttctttgaaataaggactcaattgttcattgctgcatacctttcttgaagcctgaagtagatgttgagatgctgtctttgaaaatgtctgaagatttttccatgataatgtggagactctctacctaaactgttgtccaggataagtgatctccaagggagggcatgaaatggcacatatcactggtttccctgtgacagctgcaggaggaacaccctggagtaatggtgcagtggagagtctttgccaaagagttactgtcaaaactgaactaagctgttccaagaggctcttaactctccctaatacgtatggcttaaaataaaacgtggtgtatacaaatgaaaaaaggaagtttgtttaaaaaggtccggggctttgaaaagctatgctttatgttttcaatttaggagtgtataaggcctttggttattgctgcaggttgaagaatgtgctttaacaaaagtataccagctcagaaaccatttctgtcctctcatctacccactttcctttccattcaggtgccactcaacccattttggcaaccaactaaagatacaatagcatacaccctgttaggaaaatctgtagaaaatgtagctacagttttttttatctgggttcatgcagttagtaaacactagttaagcacagactaaatgtaaggtacagtgctgggcagtgaggactgaagggcaaatgagataaggagcttgtcacacaccagactgaacaagtagcaaatacaagagtctacagtagaaaagatggcagaattagttctgactgatcagaagcagcttccacttaccatcagtgtcactttgtacacattaacctctatgtgcctcacttttctctttcataagtagagatgataatactacctcataggattgtagtaaagattaaattagtttatatgttgttataaacgtgtttacgtatgttacatgtagtaaagattaaattattttctatgttcaaacagaccctgacatctagcatgtgcacaagagaatataattatatttcgttttacaaaagatattgtggactttttacaaggcaaatggcaaagagcttcctaggcagaggccaataacctgagtaaagagacgaagcatggaagtatgaagtgtgctgaaggagttcagtgttgctaaaaatttctttaatggaaaagagtggagagatgtcctggaaatagacttaggtgccagatcagaaagggcatatgtgtcagatcaagaatttgtgaccctaatgtttacattttcgaaaagtaagccttgtggcaaaaaatggagttttgtgaaagaatgtagccatggagctcagtgactaactgcttattataacagcccaagttggagatgatggggccagaatggggacatgctgtccatgtcgatgacaacatgaactaggatttgaaagcagagattatgccaagggcaaaatatccactgcaggtgtatcctttcccttttctagaaaatagaactgtattttgtagaatctttttgttcttcatcaaactctgtttttagacttttaccttcaaaccacccaagaacattagagcctcataaactataaatgattaattttatgactcactatttaaagcaaatggaaattttaaacttgtttttatcatgagagtccctgtctggcaataattgggcaaagaaggcaagataaaaaacggatttttcttcaggatctgctaagtagaaacaacaacatagaggctgggcgcagtgactcatgcctgtaatcccagcattttgggaggccaaggtgtgtggatcacctgaggtcaggagttcgagaccagcctggccaacatggcaaaacccagtctctactaaaaatacaaaaattagctgggcatggtggggtgtgcctgtagtcccaaccacttgggaggctgaagcaggagaatcacttgaacttgggaggtggtggttgtggtgagctgagatcatgccactgcactccagcctgggcgacagagtgagactatgtctccaaaaaaaaaaaaaaaaaaaataagagaaagcaacatagatgctgaactttaaggaaatgtgatataatatggacttgctcaacataaactattgaaaaatgtgtgtagttataattattattgtaatgatcataaatatcatttactgggcccttactatatgtcaagcatatattatattacttatgtaacgtgtagtttattacctacattatctcattttgtcatctcaataatcctatgaggcaggtataattattgtcttcattttacaataaggcaagtgaagctcagaaagattatgagacttgcttaagctagcagaggaaggaactataggaaaaaaatgtggtcaaggcagaactccaacccagatctgattttttttcatttttaatttttatggagagatagtagatgtacatatttatggggtacatgagatgttttgattcaggcatgcaatgtaacgtaattacagcatgatgaatagggtatccatcccctcaagcatttattccttgtgttacaaacaatccaattacactcttttagttattttaatatgtataattaaattattgactatagtcaccctttattctatcaaatagtaggtcttattcattatttctaattttttgtacccattaaccattcccacctccccccacccttccaccagatctgattttagagtccacacacttacctgtcctgcactgagagcacccaaaaacattagcagcaaatctggttctttctctggcccagctccctgaggacacatattaaaaggataagcttctttgatgtcagccacaatcttcaaagtcttttaatttctctaaacaatgagtagaaggtctctcatgcaggaatttatcagaggctttgtgagcttatttatgttcatccactgtaataaatactagtgtgcaggtgcatggggcaagtagtgcaactgagtgagaaaagaactcagaaacatatgagaggctgagaccttgaattgtgtgtcctgagtcaggtaaatttatctcagttgcagtttccccttccataaaatgagtttatgtccatttccctttataattcaatgattagtcaactctaaattttgccacctgaagtgtatctacagaaatactccattccagattgattcagtcctctacccaaattgtctcccccatcagttgatgtgtatgtaaggactacacactaattttcacatttccacaagcaaaacacaaaggtaaacctgatgcctcccaagtaatgctgtatctgctatcaccaaacataaatgattttctgattttccactcttttggaatatctgcatcactgttggctttcattagcatgacagttcagaggtgattgtactaaattttactttgtacacatcctagtggcaatgtatttgtgctgtgatataattcatttcatgatttagtgagtcatgatggaaaaaagtattaggtacttctttttctcaatcaaccaagaacacatcctactttttccatctgttcccggcaacagatgtgttatttgacaagaacccactgatttgtaccctgcctggcatattagactcataccactgaacaacaaggtacctggcttagtgggcaccttggcatagtcccttttaggacccctcctttggttttcataaacagaatgttactgccaatcataatatgtattttgtaatggaatttaagattcagagatttgagtagaaacaacttagctattcctcctccatcagactcctgctggatacagccctcattttctcacacgtaggactgataaggaagatcaaaatggtctcctactgtgtttaaaatctttacttttcactctttaaattactggctttctgtaacttccttctgtgttttctgacatctacagtttcacaattattattcttcaagatttgtcttccttgaagtctccatttttgaagtctgggaggagcaccaaacttggttttattccatcacatttagtgatagacttcttcttctgttttttttgttgttgttgttttgttttgttttttaaagacagggtctcactctgtccaagctgtagtgcagttgtggtggatcatagttcacagcagcctcaatctctttagcttaagccacccttctacctaagcctcccaagtagctgggactataggcatgagccactgtgttatctatggataaacttttcaatgagaagatccaagtatcttggccaaaccaaagccaaaggcagacctctaatgaattcaaacagttctagggacagcttaagataaacagtgtgatcctactcggccttaagagtgaggacgctatcggttcattcagcccagagctaggaggagtctgcttcctgtctgcaagatgctattgcagggtccaaggcaggatttctcagaattgttgactggagcagggaacttgtggccctttgtaattcctaagcatcttcctccttttctaccttgccctcatcaagaatcctaaaccaaaaagtatttggctaaagtgtgaaggagactgtgattctgctttcttgaaatttttcaagttcttaaagcacacaatatgaagctctataaaaattatttatgatttcaaaagaaaataattttaaaattaagatattatgatagaaagtagccttctagtcttgccttaggcatgacaaagaactcaagttcccacctgagagagatggtgagaattgtacttcacataaatactgtttactttcactctctaggaaactctataatgggtgccatttggcattctaataactgttagtgcagaaaatagtgtttccaattatgtgttctcaacacacattttcattagagtagttggaagcaaggtttcaggtaactggaattgacctcttacttctcacagaattagaagtcaagaagttggcacctttctacagatcaagttttaatttatgacagacttggtcaactacctggctttactgtgcctacactctgagtttctcctctcccagtgagaaaactgatagccgctggcatggcaggcggtcttccacatttatctttctaaaagtgcaccaaactatagagcctcagagttagattaagggatactagaaaatcctttctcaattttctgaggctggagtaaagacatttttttctgtactctacatgtgttctcaaattctcccagatggctcctataacactggtctagacattcacttaacaattttcactcagtaccaattctggacctgacactgtgctagccacagagtacagtaaacaacaggcaagttcatgaaacactgtaatgaaactggagaactcattttggttttttccttaagaagcaaattaaaacgtgaaaaagaataaatgagaaactaactggccaacttgtaagtagagattagtttttctgatgcttccttaacatcctaagtacctagggatgtcctttacatgtcagacaccattgagtacctagaacagtgtctggactctggtagggagccactgaggtaagcccttctccactttccatagttgcttcttctctggagaaggaaacagaggaacagcttctaacagtgagaagagtaacattaaggaaccctctctgctctcttgtagccagattgcaactgtatgtcctctccttgttagactgagccaggactcccttgcaagggccccaggcttactctgtaccctcccagccatccctggcttggaagattttggtcatcaatctacatttcatatgcaataactttctcatttgtccatttccttaatcaaaggcatataaaaatgccaagcacagctgctgatttgtctgaaataaccagtactgactagaaagttctagtctaaagcaagggaacattatgtttgtggttagtatgtgcaacctcataactggtaaatcaagaatttccattaacatttgtcagtagttttatgactttgtgacaacttcagagactactgagaaccacttacgatgcaacttgggagtgtctctactaagaagacttccctgattcccatgctgggccaagtgtatccaaacactctgtatataacaatcttagtgttcttggaagtgtagtcccagatcagcagtagcagcatctagcatctcctgggtacatgatagatatgcaaatcctcaggtctcaccccaaatctgctaaatcagaaactgggatgcagacctacaatctttatttaaatatgccctcacagtgattctgatgcacactcaagtttgagaacccctgcatcctattaacaaatacatcatgttaaaactattatgtgtatgtgttgaattagaagttgtttgagagcagggaccatgtattcacagtataaatacactgtgtatgggtgtgcattacacaaacagaacgaaacaatatgtactattgtgacatgcttttattttcttccagcaatattttgtgaaaattctttattttgcatgcatatattttgtgatatggtatctgatggctgcgtagtatcttactgtgccagttacatcaaaatttctttgatcttctagtataggacaccataaagctctttttaaaactagcttttattttttatgaaaataatgcatgcatgtacttaaaaatctgttttaagtagcagcccactccacccctcgtcatgtcttattcttacttttagcagcaatcacttcttggtcctttagctgatactatttatgcccatggttctaaatgatatacatatacttctgtgccgtttcaattttagacattatctatgaaattcctgtgatgcagttgggaatttatctctctcatgtctctcaacaccttctttttcagtcttcccaatatagctttatcaaatttttggttaaagcaaaagttcagtgtttataactgtataaatattattccttgtacagccaacaatatgctatggttacatttattttgttgaaaatatttttttcagatgatattgttcttttttctaaataagcttcttttttaaacaacagttttaagttcacagcaaaactgaaaggaaagtacagcattatcccatatacccttatccccacatgcatagcctcccccattatcaacatccattactagagtggtatatttgctacaattgatgaacctatgttgatgcatccttatcacccagcatgcaaagtgtatgtgagcatgtactcttggtggtgtacttcttaaggatctggacaaatgtgtggtcacatgtatcaatattatagcatcataaagagtagtttcattgtcctaaaaagtctctgttctgcctattcagccctccctcctactaacctctggcgaccacggatcttgttactatctccttagctttgccttttccagaatgtcatacagttagttggagtctgatatggtttgactgtgtccccacccaaatctcatcttgaattcccacatgttgtgggagggacccagtgggaggtgattgaatcatggaagcaggtctttcccatgctgttctcatgatagtaaataagtctcatgagatctgatggttttaaaaatgggagtttccctgcccaagctttttctttgcctgctgccatccctgtaagccttgatttgctcctccttgccttccaccatgattgtgaggcctccctagccacgtggaactataagtccattaaaccctttttcctgtataaattacccagtcttgggtatgtctttatcagcaatgtgaaaatgaactaatacagtaaattggtaccagtagagtggggcactgctgaaaagatacctaaaaacgtggaagcaactttggaactgggtaacaggaagaggttggaacagtttggagggctcagaagaagacaggaaaatgtcagaaaatttggaacttcctagagacttgttgaatggctttgactaaaatgctgataagtatatggacaattaaatccaggctgaagtggtctcaaatggagatgaggaacttgttgggaactggactgaaacaaaggtaactcttgttacattttagcaaagagactggtggcattttgcccctgtcctagaaatttgtggaactttgaacttgagggagatgatttagggcatctggcagaagaaatttctaagcagcaaagcattcaagaggtgacttgggtgctgttaaaaacattccatttttaaaagggaaacagcacaacagtttggaaaatttgcagcctgacaatgctgaaaattgtcagaaaatcccattttctgaggagaaattgaagccctgcagaaatttgcataagtaacaaggagctgaatgttaatacccaagacaatgggaaaatgtctccagggcttgtcagaggtcttcacagcagccccacccatcacaggcccagtaccctaggaggaggagatggtttcgtgggccaggcccaggacaccgccccctccccgtgtagcctagggacatggtaccctgtgttccagctgctccagcatggctaaaagggatcaatgtacagcttgggcagttgcttcagagagtggaagccgcaagccttggcagcttccatgtggtgttgagcctgcgggtgcacggaactcaagaattgaggtttgggaacctccgcctagatttcagaggatgtatggaaacacctggatgcccaggcaaaagtttgctgcaggggtggagaacctgtgctagtgtagtgtgaaaggacaatgtggggtcagagcccccacagagagtccttactggggcatcacctagtggagctgtgagaagagcaccaccatcctccagaccccagaatggtagatccacctacagcttgcaccatgtgccttgaaaaaccacagacactcaacgccagccagtgcaagcagagaggaggggggctataccccgcaaagtcacagggtggagctacccaagaccatgggaacccacctcttgcatcagcgtgacctggtagatgtgagacatggagtcaaaggagatcattttggagctttaagatttcactgccctgctggggacttccatggggcctttagcaccttggttttggccaatttctccttttgaatggctgtatttacccattgcctgtaccccctctgtatctaggaagtaactaacttgcttttgattttacaggctcataggcagaagggacttgtcttgtctcacatgagacgttggtctatggacttttgagttaatgctgaaatgagttaagactttgagggactgttgggaaggcatgattagttttgaaatgtgaggacatgagatttgggaggggccagaggtgaaatgatgtggtttggctctgtgtccctacccaaatctcaacttgaattaccacatgttgtgggagggacctggtgggaggtaattgaatcatgggtgcaggtctttccctgtgggagcatggtttcccatgctgttctggtgatagtaaataagtctcacaagacccaatgtttttaaaaaggggagttgccctgcagaagctctctttttgcctgccaccattcatgtaagacttgcttctccttgccttgcaccatggttatgaggcctcaccagccatgtggaactctaagttcattaaaagctttttcctatataaattacccagtcttgggtatgtctttttttgttttatggagtctcactctgttgctcaggttggagtgcagtggtgcaatctcagcaccaaaacctccacctcctgggttcaagggattctcctgcctcagcttcccgtgtagcttgtggcaccatgcttggctaatttttgtatttttagtagagacagggtttcactatgttggccaggctggtctcaaactcctgaccttgtgatctgccttcctcagccacccaaaatgctgggattataggcgtgagccaccacacctggcaggtatgtctttatctgcattgtgaaaatggactaatgcaaacacacatagtatgttaagttttttcagttggcttatttcacttagtaatatgcatttatggtttatccatgtctttttatgccttgatttattgctcatttctttttatcactgagcagtattctattttctgaatatgacagtttatttatccatccacatactgaagggcatcttgtttgcttccatgttttggcaattatgaatgcagctgctacaaacattcatgtgcaaaattttgtgtggacatagttttcaactcatttgggtaaatactaaagaatacaattgtggaagcatgggtagctttgtaagaaaccatcaaactgtctttcaacatagctgtataagtttgcatccctaccagcaatgaatgagagttcctcatgctccacatcctcaccagcatttgatgttgtcagtcttctggatttaagcaattttgttaggtatgccatgatatttcattgttactttaatttgcaatcccctaatgccatatgatatagaacatcttttcatatgcttatttgttatctgtgtatcttaattgggttgttaactttttatcattgagttttaatagttctttatatattttgtgtaacggtcttttgtcagattgccttatttattcatttattttaatcaatttatttgttttgatttcaataggttttgggggaacaggtggtatttggtcacatatataagttcttcagtggtgatatctaagattttggtgcacccatcacccaaacagtgtacactgaacacaatgtgtagtcttttatctctcacctccaattattgattgatgggcatttgggcaggttccatatttttgcaattgtgaattgtgatgttataaacatgcatatgcaagtatctttttcgtataatgacttcttttcctctgggtacatatccagcagtgggattgctggatcaaatggtagttctacttttagttctttaagggatcttcatactgttttctagtggttgtactaatttacattcccaccagcagtgtagaagtgttcccttttcaccatatccatgccaacatctactattttttgatttttttattatggccatttttgcaggagtaaggtggcatcacaaaaccacaatgtggttttgatttgtatttctctgatcattagtgattttttaaaatatgtttgatgtccatttgcatatcttcttttgagaattgtctattcttgtccttagcccactttttgatgagattgcttttttcttgctgacttgagttcctcgtagattctggatattattcctttgtcagatgtatagattgtgaagattttctcccactctacaggttgtctgtttactgattgttactttttctgtgccttttagttcaattaagttgcatctatttatctttgttttgttgcatttactttgggttcttggtcatgaagtctgcctaagccaatgtctagaagggttattccaatgttatcttctagaatttttatggtttcaggtcttagatataaatgcttgagccatcttgagtcgatttttgtaaagtaagagatgaggatccagtttcattcttctacatgtggtttgccaattatcccagcaccatttgttgaatagggggtccttttcccacttcatttttgtttgctttgtcaaagatcagttggatgtaagtatttggctttatttctgggttctacattctgtccattggtctatatgcctatctttataccagtaacatgctgttttggtgactatggccttatagtatagtttgaagtcaggtaatgtgatgtcttcagatttgttctttttgcttagtcttgctttggctatgaaaggctccttttgggttccacatgaattttaggattgttttttctagttctgtgaagaacgatggttgtattttttgggaattgcattgaatttgcagattgcttttagcggtatggtcattttcacaatattgattctacccatctgtattagtccattctcatgctgctaagaaagacatacctgagactgggtaatttagaaaggaaagaggtttaatggattcacagtttcacatggctggcaaggcctctcaatcatggtggtaggtgaaggaagagcaaaggcatgtcttacatggcagcagataaaagagtgtgtgcaagggaactgcccttataaaaccatcatttctcatgagacttactcactaacacaagaacagcatgggagaaacctgcccctgtgattcagttacctcccactgggtgtctcccaggacacatggggattatgggcactataattcaagataagttttgggtgggggcacatccaaatcatatcaccatccatcagcatggaatgtgtttccatttgtttgtgtcacctataatttttttcagcaatgttttgtagttttctttgcacagttctttcacctccttggttaggtatattcctaagtttatttatttatttgaagctattgtaaaaagggttgagttcttgatttgattctcagcttagtcactgtttgtgtatagcagacctactgatttgtgtacattaattttgcatcctgaagctttgctgaattcatttaccagttgcaggagctttttggataagtctttagcattttctaggtatacaattatatcatcagcaaacagtgacagtttgacttcctctttgccaatttggatgccctttaattctttctcttatctgattgccctggctatgacttccagtactatgttgaatagaagtggtaagactggacatccttgtcttgttacacttttcaagggaaatgctttcaacttctccttgttaagtattgtgttggctgtgggtttgtcatagatggtgatatggtttggctgtgtccccactcagatctcatcttgaatttccaagtgttgtgggagggacatgatgggaggtaattgaatcatgggggcaggtcttttacatgctggtctcatgatagtgaataagtctcacaagatctaatggctttataaggtggagtttccctgcacaagctctctctttgactgctgccatccacgtaagatgtgacttgctcctccttgccttctgccatgattgtgaggcctccccagtcatgcaaaactgtaagttcattaaattctttttccagtataaattacccagtctcaggtatgtctttatcagcagtgtgaaaacaaacaaatacagatggcttttattgcattaagttatgtcccttctacgctgattttgctgagggttttaattataaaaggatagtgaattttgtgaaatgctttttctgcatctatggagatgatcatgtgatttttgtttttaattctgtttttgtggtgtattacatttactaacttgtggatgttaaactatccctgcatccctggtatggaacccacttgatcatggtggattatctttttgatacactgttggattcagttagctagtgttttgttatggatatttgcacctatgttcatcagagatattggtctgtggttttcttttttttgttatgtcatttcctggttttggtattagggtgatactggcttcatagaatgacttagggaggattctctctttctctatcttatggcatagtgtcagtaggattggtaccaatttttctttgaatgtctgatagaattcagctgtgaatccatctggtcctggactctattttgttgacaattgtttgattaccatttcagtcttgctgcctgttattcgttcattcagagtttctatttcttcctgctttaatctagaaggcttgtatctttccaggaatttatccatctcctctaggttttctagtttatgcgcatagaaatgttcatggtagccttgaattatctttcatatttctctgttgtcagttttgatatcttccattccatttctaattgaacttatttggattttctgtcttcttttcttggttaatcttgctagtggtctatcaattttatttatcttttcaaataaccaggttttgtctcatttatcttttgtattttttttgtttcaatttcatttagttctgtttggatcttggttatttcctttcttctgctgggtttgggtttggtttgttcttgtttctctagttccttgaggtgtgaccttatattgtctgtttgtgctctttcagactttttgatgtaagcatttagggctatgaactttcctcttggcaccgcctttgctgtatcccagaggttttgataggttttggcactattatcattcaattcaatgaatttttaaatttccatcttgatttcattgttgacccaaaaatcatttgggagcaggttatttaattccaatgtatttgcgtggttctgagggttccttttcgagttgatttccagttttattccactgtgatctgagagagtgcttgatataatttcaattttcttaaatttattgaaacttgttttgtggcctgtcatatggtctatcttggagaatgttccatgtgctgataaatagaatgtatattctgtagttcttgggtagaatgttctgtaaatatctgttaagttcatttgttctagggtgtagtttaaatccattgtttctttgttcattttccatcttgatgacctgtctagtgctgtcagtggagtattgaaatcccccactattattgtgttgctgtctatctcatttcttaggtctagaagtaactgttttataaatttaggagctccagtgtcagatgcatatattcttgggattgtgatatttttctgttggacaagtcattttatcattatatgatgcctctctgtgtattttttaactgctgttgctttaatgtttgttttgtctgatgtaagagtagctgttcctgcttgcttttggtgttcatttgtttggaatatctttttccacccctttaccttaagtttagaagagtccttatgtgtcaggtgagtctcttgaagacagcagatacttggttagtgaattcttatccattctgccactctttaccttttatgtggaacatttaggccatttatagtcaatgttagtattgtgatatgaggtactattctattattcctgttatttgttgtctgaaaatttggtgttttttaaattgaggttttgttttataggtcctatgagatttgtactttaaggaggttctattttggtgtgttttgaggatttgtttcaagatttggagctacctctagcagttcttatagtgctagcttggtagtacaaattctctcagcatttctttgtctgaaaaagactatatctttccttcatttatgaagcttagtttcccaggatgcaaaattcttggctgatagttgttttgtttaaggagactgaaaatagggcccaaatcccttctagcttgtaaggattctgttgagaaatctgttgttaatctgataggttttcctttataggttacctggtgcttttgcctcatggcttttaagattctttcctttcatcttgactttagataccctgatgactatgtgcctagacaatgatctttttgcaataaatttctcaggtcttcttttaaactggcctttttaaatgaattgtgctagtcttcagtgagcagtttgaatatggagtctctaattcatttttaagttcttgaaagttttcttgaattatttacttgataattttctcctatgtattttttttttcagttctgtttctgtaactactgttagttttgtattacataggaatttattctctagatttcatttttacaaacattcatctcattgtccttttattccactttctgggagatttacttaaatatatcttccaattatttgactttttaatactcatctgttaatttttttattttcaacactacttttgcattttcagattgtttctttttcataacaacctgttcttattttatggctacaatatcttttattatttacatctatcattattttctgttttctgcatatattatgcatgcattttttttctatttccttgttttctgtttcttttgacatttgactttcattttggaagtttccctcaatttatgatcatcttctgctgctgattcatatttaagaataaagcaaaaaataaagacagattttgaaatgtgtttgagtggaaggttttatgttcactgtagcttggtcttgctgagccagcccttttggaggatacctgatttagtgtatataggtttttctctagagagacattgaattttttcagaaaacacctcatactcttgcttgggaacataacccttgcttccaggaggctgaggatctcaccattctgtgtatggatttggggctttcagctacaagttgaaaaccaattctccattgtgtccgttgctctctttatttcaagtactgagggaaaaaattttttgccttctctctgggagaggactacagttgcatgcctattctctaggtattgactttcaaccagtactctgttcctcttttaccccagcattttgttgtgctttttaagatatcctggactcttagtctgacttactacctctataaatgaaaattgcttgaattttcagagcctctttacccttatctgtagaatgtccaccttaggaattgaaagaattatttatgtaaaaatactttatggctggatgtggtggttcacacctataatccaagcactttgggaggctgaggcaggcagatcacttgaggtcaggagtttgagaccagcctggccaacatggcaaagcccgactctaccaaaaatacagaagttattctgcacctgtagtcccagctactccagaggctgaggcaggagaattgcttgaacccacgaggttgtggttgcagtgagtcaagatcatgacactgcactccagactgggcgacagagtgaaactctgtcccaaaaagaaaaacaaaaacaaaaacaaaaactttgtgaagtaactgtaaaccacagtacaattcagctatatgactgtgacttctttctatgccattagatgagaaactcatatatgacagctacactgctacagatttatatggtctcttttttcgtttttcttttctttctttcttatttatttatttttttgagtcggagtctcattctgttgcccaagttggagtgcagtggtgcaatctcggctcattgtggcctccgcctcctgggttcaagcaattctgcctcagtgtcctgagtagctaggataagaagcatgtttcaccacatctggctaatagatatttcttttaagttttatataatcttaaaagttcaggcaaatcaataaatgtaatccagcatatatacagaaccaaagaaaaaaaccacatgattatctcaatagatgcagaaaaggcctttgacaaaatttaacaacccttcatgctaaaaactctcaataaattaggtattgatgagacgtatctcaaaataataagagctatctgtgacaaacccacagccaatatcatactgaatgggcaaaaactggaagcattccctttgaaaactggcacaagacagggatgccctctctcaccactcctattcaacatagtgttggatgttctggccagggcaattaggcaggagaaggaaataaagagtattcaattaggaaaagaggaagtcaaattgtccctgtttgcagacaacatgactgtatatctagaaaaccccattgtctcagcccaaaatctccttaagctgataagcaacttcagcaaagtctcaggatacaaaatcaatgtacaaaaatcacaagcattcttatacaccaataacagacaaacagagagccaaatcatgagtgaactcccattcacaattgcttcaaagagaataaaatacctagaaatccaacttacaagggatgtgaaggacctcttcaaggagaactacaaaccactgctcaaggaaataaaagaggatacaaacaaatggaagaacattccatgctcatggataggaagaatcaatatcgtgaaaatggccatactgcccaaggtaatttacagattcaatgccatccccatcaagctaccaatgactttcttcacggaactggaaaaaactactttaaaattcatatggaaccaaaaaggagcccgcatcgccaagtcaatcctaagccaaaagaacaaagctggaggcatcacactacctgacttcaaactatactacaaggctatactatactacaagtaaccaactatactacaagtaaccaaaacagcatggtactggtaccaaaacagagatatagatcaatggaacacaacagagccctcagaaataatgccgcatatctacaactatctgatctttgacaaacctgagaaaaacaagcaatggggaaaggattccctatttaataaatggtgcttggaaaactggctagccatatgtagaaagctgaaactggatcccttccttacaccttatacaaaaattaattcaagctggattaaagatttaaacgttagacctaaaaccataaaaaccctagaagaaaacctaggcattaccattcaggacataggcatgggcaaggacttcatgtctaaaacaccaaaagcaatggcaacaaaagccaaaattgacaaatgggatctaattaaactaaagagcttctgcacagcaaaaaaaactaccatcagagtgaacaggcaacctacaaaatgggagaaaattttcgcaacctactcatctgacaaagggctaatatccagaatctacaatgaactccaacaaatttacaagaaaaaaacaaacaaccccatcaaaaagtgggcgaaggacatgaacagacacttctcaaaagaagatatttatgcagccaaaaaacacatgaaaaaatgctcaccatcactggccatcagagaaatgcaaatcaaaaccacaatgagataccatctcacaccagttagaatggcaatcattaaaaagtcaggaaacaacaggtgctggagaggatgtggagaaataggaacacttttacactgttggtgggactgtaaactagttcaaccatcgtggaagtcagtgtggcgattcctcagggatctagaactagaaataccatttgacccagccatcccattactgggtatatacccaaaggactataaatcatgctgctgtaaagacacatgcacacatatgtttattgcggcattattcacaatagcaaagacttggaaccaacccaaatgtccaacaatgatagactggattaagaaaatgtggcacatatacaccatggaatactatgcagccataaaaaatgatgaattcatgtcctttgtagggacatggatgaaattggaaatcatcattctcagtaaactattgcaagaacaaaaaaccaaacaccacatattctcactcataggtgggaattgaacaatgagaacacatggacacaggaaggggaacatcacactctggggactgttgtggggtggggggagggggagggatagcattgggagatatacctaatgccagatgatgagttagtgagtgcagcgcaccaacacggcacatgtgtacatatgtaactaacctgcacattgtgcacatgtaccctaaaacttaaagtataacaataataaatttaaaaaaaaaagaaaaaaggaaaaataatcttgtaaaaaaaaaagttcacatgaatcttgcatcttgctccataatttatctgttttaatgtaaaaataatgttcttcaatcttttatcatggagccaaactgacaattcaggaagatatgtgtattccttttgggatttatgtgcctcccagcatattgggagatatccttagcagtttatgtacccctgtttaagttttatagaaataatctctaagccattagttctgataaatttggttccttccaatcctttgtttctaaactttgattcaggatgatctgacaaattaaatagcacccttaaacaataaggcatcatggcccagtatacagagaaatatggagatagaatagaattggcatggtgtctcacgcctgtaatcccagcactttgggaggccaaggcaggcggatcatgaggtcaggagatcaagaccatcctggctaacacagtgaaaccccatctctactaaaaatacaaaaaattagccacgcgtggtggcgggcacctgtagtcccagctactcgggaggctgaggtaggagaatggcatgaatccaggaggcagagcttgcagtgagtggagattgctccactgcactccagcctgggcgacagagcaagactccatctcaaaaaaaaaaaaaaagaatagaattgactatgggctgttgagggagtagcttattacaaatgtgtaaacctacttgtgccttgttgttgtacagaacagtgaaaattgccaggggagtggagaagaaaattagcagtgtctgcctattctggatatttcacatcaatggaatcatacaataagtggactttgagtctagattctttcacttagcatgcatgatttttcaaagtttgtgttttagcaaatatcagtacttcattcatttttatgactgaataatattccattgtatggatataactcattttgtttattcaatcatcagttgatagatgtttgatgatttctcttttggctactgtgagtagcgttgttatgcatattcttgtacaggtgtttacttgaatacctgttttcagttcttttgggaatacttaggagtagaattgatggatacagtaagtctatgtttaatttattgaagatctgtcaaattgctttctacagtgattgaatcattttatattcctactagcaacgttgaaggttcaaatttcttcacattcttgccaacccttgttatttttcatttttttaaatagccatactaatcagtgagaggtagaatctcattgtggtttttgttttcattttcctaatgactaatgacattgagcattttttcaagcgcttgttgaccatttatatatctttagagatatgtcaagtcttttgcccatttttaaattgggtcgtttgtctttgtgccgtggtgtttcaagcataaatctatagacaaaataaaagctacttgttggctgttttattggaaatcacacaacttgggaaagtctcaaggataaattttgctaaattctttgtccactattcactaagagggtcccttaccctttcttttcctttgatcattggttatctggtttcacctgtcaagaaataagctgccctttgattgtggataataggtgagacaccgcagaatcaagttacactgttgcatctgtaaagtttcatcactgtgtgtttccaggagtcaggatttgccatcaaagtcaattgccgaatgactctgactttattattctttatttgcattaacaattgctctaagcagtaacacgattataacccaaaacagcagcctgttatctatcatttatttgatttaatacatagaaatggatgtctttcaaagagcatttatttttttcttcacattctcttccaaaatcattctcagtggaaacatttagccttataacatggaggaattcctttgtaaatccagtgactatgtgggagactaagaatttctgattttattaagtattttggataaatgggtaaagagaggaatggtggcagattttacaatggttggtttaggcttctgtaggccttgagtaaggtgagtaggagtaatgcctgtggtcatttcatttgaatggcctatttattgaagtaaattcatagttcaaaaagatccaacttagaaaagcctgaggcagaaatggaatcctgggagtgcagattggtcattgttttatttaatctgattccactttattctcctcacggtgaaattgttctttatgatactctgtatctactggtagttcacatccttcacagaatcctctaactatgcaaaacacatagtgaacagttatcatttgaatcttagtacaactttaataagctgtgttttatatttaagtagtttctcccctggtggttgcccgtggcagactttggagtttgatagctcttcactccctattttatacatctctaagtaattataccctgtgcccttaagcctcaaaagcataaaattatttaaaaacatacaattaaacacttcagatgacagtgttaaaacttcagaagaagacactcactttggaagaatggtgcttcgtgctggagcctttatatcagctccttcttctccagagactttgggctgaagtttctgtctcagcatgggcatctgccatgcttgttacaggctcaggatgacccagcctcaaaattctattaacttgggataccattttgcaagggaattcttgtcatcagctttgagggaggggaagcataatgatatacctgatgttgacagtaagtgttgtagtggcagtgaccacgtgttatactcctgatggtatgctaggctccctaggtacattgttttacttaatcctattgaaaccccacaaggtgattgttattaccctctcattttacagatggaaagactggggcttaagtagttgtttggttagtgagacagtaaaaagcagaataaggatccagacttaggtaaactgaccacagttctgaaaaagcaagctgggcagggtcttgatggtgcatagcatgtcttcagcatggtctcctctgggcagtgtgtctgactttcctagtcagcctgaccacatggcctcctgtttccttggcaccctgtacgtgcttcttctgcagctgttgtcatcgatatggcaactccctccaaacctgtccccatccccccagcctgtaaacttcttgagagcaatgatgctgtgttgtttacctctgtatcttcaagactcaacacagaacaggagttcaaagtttgtggaatgaatagtggaattaatggtaaaaaaaaaaaatgtgtacatacgtgaattaataggttgtttcctgctctctcccccaactcttaatataaaatgggcccagccattttcataagtccctgggtaaatcattccattatttttccctttactttgttcagtccccataattccttttttagactgccttgtgcattcttattttctacagttggcacttatctgtgatccaagccacatacagccttttaaaagtgtgagatcttacccattagtaggtcttgaaattaattttgagggtggcagccagcattttttttttaaatgaagagactagaaaagaatacaacttctcagcatgcatggcacatagaaagacacagtatttgtttcagatggatagataaatagaggacatatatgtatcactagcacttgtttgaccacaagtcacacactaggacatcatttaagacagtgaaagacatttaggcacatagacacagtatttgtttaagatggatagatagagaacatgtaagtatcactagcactgattaaatatcatacgtgcagccatgttttaagaaggccaaatgctgcagggatgctcattaggggagtgtattgcaacaaccactatccacattttaaaaaattgtacattgtgaccaattacatatctgctgtgtaccagattgtactctgaagtatattccttattgttggaaaaacactgtcctaaatgacgtcccagtgtgtgacttgtggtcaaacaccccttgctctgctaaagtagttcctaaagtcttatattttgtaaaagctattataaaactgtcaccaaagtttagaaaatttaatcccagtgcaattattttaatgatgttaaagtataaatgctgcagagaatttaataggaaaaacacatagaaagttctaaaaattttaatagtgggagcttaactttgaggtttgcagaattattttattttgtactcgtctttaaatttgcttctccaaatgttcacctaaaagtcccgctgctttaggtaaattgcgggggctacatttatatcagtcagtggcattcatgtaggatttcaacttcaacttgctgtgaaggagccagactttgctgtggaatgcattcatgtgcagagctgccttgcacagctcattggagataagacagttttgacttcacatgccaaacttttgtcactttgtctattttcgtatttctctatgactctgcagagccaagcttttgatcggttgagcagcaaattgaaaatgctcttcttaaaaaatctaatactaaagtgaataccaagcaatactgcatttcctgaaatgaatatttgttgagtgcttactctgagctagccaattgttgtaccctggggttataaaaaatgaatgagattcactttctgctctgaagagtcttctggtcgaggagctttcctaccgcagggtttggattcatcttgcttgggtctacgggtagactgaagatccttcgtttgccctcccaactcattctgggcctttccccacctttgacctgtgaggctggtcaatatgggctgcaatcgagggctcccttgctgtctggcatctggttaggtttaaccagggggagcactagcaggaactagagggaaggagaatggagaggttagcatatgtgttctcccggctccctccttgcaaggtcacccaggttggctctgtctctctactaaaagtcacagcttcattcaggtgtcctctccacactgttctttctgtttccatgttctagtgactgctccctcccctagcttgccctcctttcccctatagggtactgtgccatcccttgtggttttgctataccctcaccacaaactcctaaatcacccttttgacactgacttagtacctcactgaacacgactttactctgaactttttcctttaggtcctttcagtgctcttgacttatgccttagctaattttctgccatgatttcaaaagacttacgtatttgtacgtttccaggaagccatcttattaatcaatatggaaagttatttaaaaccacaacctctggttcttacaaatatgtgttagctctatgaaattgatacttggaaagctcaataactatttataactgtgggtgatgttgatcatgacccatcaataggtcagagccttcattgttaattacctagttcactaggctttgttacaggctggatggaggtaggtatcccgggaggaatagtcttacagaatagtaggagaacttaccactttgctgacaagttgaccaccagtccccactttgtgagtcctattttaagtgttgccatctgttctcagaaaagaattaaaaaggatgagataatcatttaagcccctggcaacagcaatagctgagtaagtggtcatttattcattgcctctgtatatcaggcattctacttcacaagcatcctactagaatctttaaattatcattatatttaacaattacaattaccctacgaggtcattcttaattccactttatagacagagaagctgggagtaaaagaatgtaggtgactttcccagggaagcacagctggttatttccagagctatgatttgaacccagctccatcaaactcagaagtattcctcccactatttcatctccccaaatctctttctttttgccttcaatgttgccaaaagtcatgtttggcatcaggtttaagattattaaaacttcaaactttcttttttcaaaatcaggcgttctataaattaaaaacaaaatctgattgggattcatctccttctcttccaatagaaacagagtagagggcatggaatttgagggaaaaggaggaagaataaatgaacagcatatgagcaaaggacctggggaacccccaagtgactaacaatcaaaaatagaattttctgcatgtcagatattgagtcattcgctgcatggcccaattaacctttcttctgattccagattttgaacttgtgtccttggagaacaaaatgcttacccattgccttggctgagtcacttctgtgcagttttagatgaaccctgcttgcacattattccattggaaacaagcattttcacagtaggttaaggactgggactaaaagaaaagagaaagctaagatgtccatctgaaaactgtcagtgtcgtctcaatggaaagttatgatgttttacttctctgaaaaagctaaagaaagcaatctggccagttataaatttaatttatgaaaataataccacaggcctaaatcatccaacactatagctattgattcttctttctagttccttggggaacagttgctgtatttgagaaggtagaactacaattgtcttactttgtcatttaaatgtcatattagccaaacactgagcacagctgaagggttgcaaactgactaggaaagaatgggatagtatttttcattttttttttaaatgtaattggtagacagattttcctgttggtgagggctgattttttttcctcattatttctctctccttttattttctccacaatgttgcattttcttggttttctgtgaggcattaggaaaggataaatcatgacgttctgggtctatggtcttttttaatctctcagattattttctttaacagaattgttggaaagttggctgttacctgacagaaaataaaacaaccaatttttcatcgcaagttaaataaacattgaaaaatcagcattctacaaggaccattagcttatgtatcactgtaaaatgttttatgactcttggtataaaggatgctcatataaaaataaattgtgtcataacaaacatttctcccagtcatggtttgtaatagccttaatctcaaataaatctaggttgaacattgtagtctccagaaaaactgaccttcagtttcaaatagttgggttaaatcattgtgatgatgacatagtctcagatataaggagatatgaacttgtatcagctccccagataatcttttatttagaagaggagagatgtctcaatgaactgaaattgctcttgagtgaaccattttatttatatatcttcttattctgactaccagttcacacacagtgccacagagaatcctgcacatagctccctagggttcctgagagagcaatccatggaaatacatagattaaaaaccatgagcaattgccattttacatctgtcaaattagaaagcatttttaaagtgcaatactgctgctacaatgttggtgaagtgactggactcatatactactggtagcaatataattgctttggaaagtattttggcaatacatcaagtgttaatatactttgatactacaattacacttctgagaattttgtgtaaggagtaatttagaagaattcagaaggctaagatgttcactgcagaattttttatactagtgaacagttagaaacaactacgtgctcaacaatggagactcttagtcaattttaaaagtctgtaatgggttatttgcatgaagtctaattggcaacgtttaaaattttgtgatatagagctcagtaaaaagtactaattataagcatataaaattattgcatatagataagaagcagacttcgctaaaattgttcagatttagctgttaaatgatattttagctttataatttttgtattaaacaataagatctaaaaactacttgactgtgaagattaatattaatgaaaagatgtttttattcgcactttccttaagatgttttagttgttcaagtatgaatctttgagacctgaaagtgtcaaggattcggagaattggcatttatatgatctaatttacaaaaaaagaaaagaaaccaaataaatgaacaaaagagagagacattcttccagaataatgaaacctcccattcttgttcttttggggatttttaatgttggcacttggagtaagaagatctcatcagataatttagagagaagtcattcctttaacatgatgaagcagtgtagcttgtggccatgaaccgtgaaatgtcctgatatgagtggcgtaagtaggctttttggaaggggctctatcccaaagagccataggacagaagaaaatgtgaatataggtgatccatccctgctatgcttgaatcagatctataaacattgcatagggaaaaaagaaaacttttggaaataacctaaatgcccaacaactggggattagttaaataaagcatggtatagtcagatgatgaattattaagtaggcattgagagtaaagtagaaaaatattaatattaatattaatctgattaagtgtctgcagtaaagttatgtgaaaaagggagataaaaattatgtatacaatattaaaaagttgtaaacttatcaatagtggttatctggatgttggaataatagacaattaattctctattcctgtccatattcttcaattttttttctcctatactgtgcattactaaaataattaggaaaaattttttgcaattattttttcttaaactgtatgggtacccaaatacataatgaatgagctattgcctgaaataatttaaaaagtggcagcatataaattgcaataaaatgaaatacaattttcactgtataaatggaatgaaagtctaaagcagtactcaggtaaggacatttcgttttaatgtaacgccagtgaggagcttgcatttaagtgccaaatattggtatttatgtatatgaaagctcttctttactctcttatattttctttttttctaaaattttttttttgctaaaattagggtgtcatatataccagaatcaatcaattcttccttctctccttcttttctttctttcttccatccccctacctttcaattctgcaaagataggcaagtgagtgagggtgggtctagcttagtgtttgcccatatgtaaaatgttttgagttcataaaatcctgaaaaaattaaagcagcagacagaaaacagaaaagacccccacttagatactgattagcaaatagacacaaacatttcctctaaatacttcagtgcctgtgatttaagtagctacttgggacacattgaagagtctgttgttagctttctgcattcacatgataagaaacaaagaattctttaggcttgacctttgcaaatagaaaatcctgaaaacgagaatgctgtaatttttctttgtgaagctcaaacatatattgaaagagattggcctcgaatctgtcaccttctcatcactaaatatggcagccctgaagttaattaaataatgcaaatgctcaaggcggccttcactcactcctttcgatgcactgataaatggaggattttagttaggggtttgttcttgttcttactcatttttttaccaaaagattttgtctttgcttgtaatacttgaggatctacactcccattatctcaattgaggctaagggactaagggattccctgtccagtgtgtgatgggccagtgtaatcattataagtgatttcaaatcaatataatttggcaatagcaaaaactatgagaatttctcctcaactttttattggttttaggtaaatacttatgaagtagaggaaagaaggtaggacatgtgaatggaaggaaggagggaaagagaaaaatactctgaagtcatgcaggaaaaaataatttctttccttggccactgaacctgttgatgtggactcatttgttttttctcccttggtggtttaaaagagaaagcctcaccaaagggtaatcaattgattattataatattattagctggattaaaataatgttatttgtgcagaaaacaattcttgcatatgtttattttaaattcctctgattatgtgttgtaatggcttagcctaggagttagccaaaaatgatgtttttctaacacaagactgttgttgaaagacttctttttccctaattatttattgtgatcctaacacaacacacaccctcctgtttcctccttcatgccatcatcatttacatttttgttacctccttgtggatttgagggacgatatctaatagtacagaacatagcattgctccaggacctagcacaatgtcttgcctagtgtaggtgtttagtaaatattgaatgaattaaattcagaaccctgagggagaaaagtcacaaatttatcaagtaattcacaaagagacatatccctgacagctaatccagttaaaagtattaaggtaagctgaaaccagaatatgtttcaaatcatttctcttcttataagagttttgttactggctggaacagttgtttcttggtatgctgatcgaatgtgacttgagccagaaagattcacaatgaataacaccaggaggcttatgaatgatgtataaagccaaccagtctaatgacaggtaaggcagaggtgagcagttactttatttcagagcagccaaagtcttggcaatgtaatgcaaccacgggaatagtgagtggttgtgaccagtttgtagtaaacttctagaatgaaacaagctttaaatgttctgatggatatttgatcttttgtattaatggagccattgcttcagatgagcacaaatgaaaatggcccctcttgctcctctagtatttgcccaggggttacaaggatcagctaagtgctatggagggtattaatcactttttacttgcagtgaaactatatttgttttttggtaactagcaattctaatacagtaaaacttcaactactaaataaatatcattagtattatgactttaattgaagaccaaggtgtcaccatcttgaagaaaatggtgaaagtttactttctgttccctattgatacaccagggccaacactgatgacctgttaacaataatgatataatttttttttaatttttcctgaattttctttctaaaatctaggttcggcaacagaataatcaaaggatttattgctttgccattctgtgcctagcactgtgaatctctgtaactgacttgatagaaacatagatcataatatttttgggtggaaatgaatcacagcttatggttgcaaaagattccacatgaagctaatggattgtagacatctgggaatgggaaatgatatggtagactggctagctgaagactgggatctactcccactgcatgtgtttctgtatataaaaccaattgctcatgcttctgtttattcattaaatgaaactcttattttatcaggtgggttccttttcagtggcaagttaaaataaattagaagaactagaaagtgatgtcacaaacatgaaatacattttctcctgtgttgtctccctgttgaaaaaaccttttcaaacagatttttccctcatggttccccaaatccaataggggggaaaaatccagggtttcttttcccctggagtttggataaaaactcaaggcttgatctctttagtccaaatgaggtcacctgtccattccaagaggccatcactgaggccaagagaatacctgggtcacagttctctactggaagtgggattagctccacataaactgggttgagcacagggcgggaattcttatgctgaggtgattttaccagaagtagaaattggatgttgtaggcacatgacagatattcactgtgcttactggtagccaggtcctttacagattgttgatacaaagacaaacatgacttgatctctttccctctctgaatctcaccacctgatctttgttaataataccctgtggtcaatttttcttacgtcatatttctaatattgtcctacccttcttcaaaaatgtttctggttctttatcatctattgattaaaatattaactccttggttaactttcttcaatctacctctcaatcctggcaaaagtgactgattacatatccttggattttcctgcctctgtgagtgtcctggaatgtcttcctccatgctaatcactgaccatctgaataccgttaaggtgtagttcagatactgtcttcataaaacacccactgatttccttcatctactgtctatagcacttaacatgaacctatcttaaagcacttactgtttgtttaacaagtagtgccaaatgcttactatgttcttattgtttttctgagtgcttaaaaatatgtttttctactttgtatcagtgttcttggtgctcttgtcttttattcccagtaagcgataagctcagtgaagccgggattcttaaaggcaatgagttacctacccatagtgggcaaacaacatatttatactggataaatacatgttaatccaatttgcacatttattgagcactagcacttcaaacctaagagagtagggccctattttctttcaaatctctctctgcacatagtatggtgacatatatgtgttaggcattcaataaacatttgctaggcctctaaatgtgatggaaatttcaaatatccagatatctaagaatgagccatttccttttgttttacattcttcagtctttaggcatcatttttgaaacctcttgtcattttgctcttcctaacagtttttacaagaatgtctaagttctactttctaagttgagcaggatttgggtccccttttttttttttaacaacagggacattttcagcaattgcaaatgcctatgctattgagccattgctaaaatactgggttttataaagtgcttctaagggccaaagagctttgctggcccatggtctgtgcaggtgttcatgagttaaagcattcaatggccctagcaaacatgacatttaaggaggtaagcattgatttgtagagtcactttcaagtacaatagaacatcttgccttcatttgtgagtttcttgtttgaaatggccgacattttaggtgtttccatgtagaaattttgtctaaaatatgtaaagcataaatgggtaaaagaaaagattcatttacttgatctcatccatgctggacaaggacaaggcttccatgttgtctttctattctgaacaagagattggaagcctttctctctcttttttcttttctgttcttttcttttcagttttcctcttttgtcgtttctcttcatgaataacttttcaaccaagttagatgaatgccaatagctgtcaattgccactgacaactagaatggccttggtgatctgtgtgagaacaattttagggaagtggtgaaggcagaagccagatgacagtggatgaacagttgactcagtagtctggtgagtgagatgtgagctccggaaagggaccacccaagctaaaacccagactctgctactcactagctgctgacaataggcatgttaccaaagcgctcactctccctgcctcaatcttttcctctataaaatgggaataaaaatagaactatctcaaggttgttatgagtagtaaatgagttcacgtggataagatgcttagaacaatgccagtttcattataagtactcggtaaaaattagctgttgtttttggtgcacgtgcgaagacagcaagttgagactacttttgaagcttaattatgaaaattggagagaaaaacgaggccagaggtagatacaggccaggaattaggtgaaaggtgattattttatattctgggggaaaagaagtggctctcggagagtgacagattacaaatgggggaagaaggattaattgatggagtaatagtgctgaaaggcgagtgaggatggaattcagagaagaggtgaatagatggatggataaatcttggatagaaggggcttcttgttctctaaggctgaggctaaagtggaggtaataaggaggaaaggctaagaatgcatgtctttgtgggtggggagtagagagttgaaaggattgaaccctaacagcttactgtctctgtgaaatagaaacaagctcatctgatgggagacaagaggtttcagagtgaggaatagagtagaactcataaatgaaggagaagtcacacagcagtaactcctagagacccgatgacactagccagaatgtatagtctaaccaaaggattgagaagtcaggtatgataagaaattgtgctcacacagtgagacactggcatttgcttccacaggtgggacatttctaggtggtgacaaatctgagatgaaccatttgaaaatttttgtggtctgcagtgtacagcttgaacttaaaaaatatttttaccacaaataaatgattgattatattcatacctttcttgagttattaaattatcttctgtttcctatacatttgcagtgctattgggatggtagactttcagagttgaattatatcctgcctctattccacctaatgcatccttgagaatagttatagatgggaaagtcacattttattgtgcttatcatgttattctttagtagacattccattaatgtagaaacatacatggtgtgatacggattttatcttgtgatgatcagatgaaaagccctcctttcctgcatactcttttgcaatgttatttcatcactcttcccatcaagaggtggagtctacatttcctcctattgaatctgagccaggcttggaattagtttaaccaggataaggcaaaagtagcacagtgtgacttctgtgcctaaaccttaagatacattgcacttttcatttttgccatgttagaatcctgagctaacaagaaaaaaaaaagctttaatttccctggcctgccagagagaaaggccaggtagacagagacccaggggatgaaaaaccatagaaagagatagggtgagacagtgagacagcatcaacgagttcaatcaccccaacagagacattggacatgttagtaggaccagcttgcctcagtcaacacatgtggcacagagacaaaccattgccatagagcctccccacaatgcagaattgtgagcaaaaacatggggactgtcactttaagcagaatagttttgagagctttattatgctgcaatagggcatgaaaagaaagagcctcaaagcagagagacaaattacaagaccactggcataatccagatgtcaggcaatgagctggaaagtatagagagaaaggtagaggaaaatgtgggagagcagtaggtggcaaggttcagcgggacctcatgattggatctgggacaaaggagaaagagaaataaagattactatgacactctgtttctaggaaaataagattgtgaacagcaatatggtctagataaagaactggattttgggggaagataagtccaattggcagttgttatttcttgatgtgataccacaacttctatgtaaaacactcctaagcagctggagatacagaccagaagcaaaggatggagtcaggtgattagaatagctattaactgtttttgtttcaaacaaaaagatgcagtcagctctacttccctgttgttccagcctaaagggtgttttctaatttccttctaactcctatattgagtaggaaaggtagagatgtcaagagaaggcggaagagagaaagagaggagagggagaggactcttgtgaagagaaaaagccaactcgcatcctgtgggattgcaccttattttagttgcacctcttggaagcttcactgcttatgtaaaaataagaaaagcaacatacacgctcaactaaaattatcgtcattcaagagtcctccctttaaatagcaccaaatgaaaataagaaaccctaacctcagctttttaaatcacaatggaaggataagagatgctttccatttatgggatcttagaaccttcaaaatggtgctacttttgttccgtgtgtgcatagggaggaagctgggaatgctgaggtggcgaggtttcacctggcagtcaggattgctacttcccactcaccaagttgtgcaatatttgcaagaagagcaaaaaataaaagatagtgtctctttaaaagggagacagtgtagtttaaagaggctacagtgtagtgtagcggcttacgctctgtggtcagcaagaactgagtttaggtccttgtcccatcacttactaactgtgagaccctggatacaatatcaactcctaaaaacctcagtcacttcagctgtaaaatagggagaatgctgtatactggggttgttttgaagagtaaagcagaatatgtatgaaaagcacttagtctggtaagggcacaagttactaagtggtaactatagtcattggaattagtaatttgggactttcacatatttggcttatcattgagactattttccaggaatgtttacaataagaaacttgggccaactgcattttagtcaaggattaaaatgtaacaaatgtgtaatattatattatgtaacagcagatgattttaaaatttacaagtgtcattaagatttctctcctagggtacaaatgttgttgtttcacagaatttttaaaaattattttatttattttttattctacttttatctctgggatacatgtgcagaacttgcagacctgccacataggcatacacgtggcatggtggtttgctgcacccatcaacccatcatctacattaggtatttctcctaatgctgtccctcccttagcccccagcccccgacaggccccgctgtgtgatgttcccctcactgtgtccttctgttctcattgttcaactcccacttataggtgagaacatgcggtgtttggttttctgttcttgtgttagtttgctgagaatgacgatttccagcttcatccatgtccctgcaaaggaaatgaactcatccttttttatggctgcatagtatttcatggtgtatatgtgccacattttccttatccagtctatcattgatgggcatttgggtcggaatttttataaaacttcaagcaaaccgaaactgacatactggctacttattttttttcttcataattctggatgtcagaaaatgaacaatgttctaatgcagaaggcaaactttctatgaaggaccagacagtaaatattttagctttgcaggccacatacgatctctatcacatacttctttgttatttcttacaacccttttaaatgtgtaaaaactattcctagctcatacaaaaacaggctattggtgggatttgcctcatagactgtagtttgctgacccctgctctagtataaatttgtcttgtttattactagagtgcttatgccagtaagtattttttaaaagagagagaaaatgcattaagtaaataacatttaagtgattctttttctgattcagacattttctgggatgaaatgagaccattgatcattttatttgatggaatagaactgtttttcattgcagtgcaatgaggttaggtatgattttgaggactggggaccattcagcacattagttctgaaccatatccttgtgctttgcagaatttttttctcttcctcagaggagcagtttgaatacagggctttatggcatcaggcataagctgccattaaaaccttcaactgaaaattgtgctgccctttatgaaaatgagcagctggtcagccggaccatcgcccaccctcagctctactcatgttgtgtacaagtagcttgaatagcccttcatgagcaggtcttctacagacattttcctatcagtgttgggagggaaagccagaccagcagctagtgtttctttcagcctgtgttgtgccttggcatctgactctctgtggacccaggagtgaaatatcttcctggaagtggtgatccaggttagtcttgtctctctgactcatgtcccaagttgcttccatagagatacctgtggcatcttttccccctttactctgttttcctgaatttccctctatttttcactgactacaaagataaagaaaaagaagaaacaattttaaaacatataaagtactttgaaatatttatccttggataactggagactagatcacattcttatcttttcatccagcatttttttttttggtgaataccatattatgtgtttaaaaagacatatggagacctgactcacactctgaatcttccaattttccattgaccacattcttaatgccctgagaacacaaggtcaggcaaaggagcctctcagctgaggtcctggccccaggccctaaacaggtcttctgtgagccaggccacagagttccttttggttggggtcagtcttagcagaatgtagatcctggagcaaatttggtcaagcagcttcctttgctcccatcaccctaagcctgcactggggcctgacttctggcatctcaccaatccagtcatgagggatggctggctcagaaagagcaccttgtcaaggaagaagcagctcaagatcacgaaagcccaagcacatttgtccctgtgcccagaacagagctagactggtctgcctctccctgcattcttggggctcttcactctgtgtattctcagggcaagggttgtaccaagggagagcacactgtccagcctcctctcaccaattcattcagtcatttacccactcaatacagatttagtgagtatctgtcatatgccagacacagttctaagtactgaagacacagaagtctttgctcattttactccataacttgctctgaagaggtgcctccaaggatcttactctttcatgggctctgttctcgatcacttttgctcagtattgtgaaacctatgggcctgtgatcagaaaaaaaatgtctttaaaccagtctaatccatgtcaaggtcctctttggaaggggagtagcaaggactggtgagaagggagctgtgagtgcttcttgaatgtaggacctgctccttactggggagaatagctcactcatttctaccttcctccaggtctcatgaacatgcacagtcctgtgtgttgcatctcctaatctcatctgattctctgctgtttgcctggtcttggactaatttccctttagcccacatgatgatctttaagttaagtctcagcctatttagactcaggctgcctcactcaccttgcagttgccatctttattatattatggcagtcaaaggttattttgtttggacagagaagttactctactgtatggtggactacctgtcctgaacgttcgcaaacatatccttttgttttctggagttcctcctggtttgttttctgatggatttctgttgactcccagattgaaccaatgtttatcctgtgtttggtgtatcaggcttttctgttctggttgatttcctgtagctaatttctagggagacttcaattcctcactgaagtcaagttccttgtcatagaggcccagtatttctaactcccattcagacagaaaatttgtttttattacccacaagagaaaatgatctggctttcctgctctaaagatacccctagtactactattttttccagtcttgtgttttcagatatttttctttaattgaccttctctatggtcagattcgtgactgtattccttcccctagtttattaattcttttttttttttttttttttgagatgaagtctcactctgtctcccaggctggagtgcagtggctcgatcttggctcactgtaagctctgcctcctgggttcatgccattctcctgcctcagcctcctgagtagctgggaccacaggtgcccgccaccacgcccggctaatttttttgtatttttagtagagacggggtttcactgtgttagacaggatggtctcgatctcctgaccttgtgatctgcccaccttggcctcccaaagtgctgggattacaggcgtaacccaccatgctctgccttattaatttctaagagtcttcctagaacactgtaagtatgcttaacctggtattatagagacatgtaacagaactaaatactttccactccacaaaagaagaggctattttgaactacatgtatcttcacagaggttactccagtaagtaacttgtggaagggagggtcattggaatatggaaacagacaaaataaaatctgttcccttttcctcaaacctcacatagcctcatacaattaaatgagatcttggttacctctcagcctgtaaagattcccctgagtgtgtatgtgtcaactcctgtcttggttcattttatgctgctataacagaatactgactgggtaatttataatgatcaggctgcgtgacttatgatgaacagaaatatatttgggttatggttctggaggctgagaagtccaagagcatgctggtggtatcttgtgagggccttcttgccatgtcataacatggcggaagccatcaaacggagtagagagaacatgcgcaagggtgggatagaagggggccaaactcatccttttatcagaaacacactcccatgataactcatttccctagcaacggtattaatccattcctgaaaacagagcccttatgattgtactgccccttaaaggtctcacctctcatccctgttgcattgaggattaagtttccaacagatgaactttgggggacatattcaaatcatagcaactccttattacccaaatttatcattatactggtcaacctacacattacaaatttacatttaaaaaaagtaattaagatttgctaaacttaaaagatttataagctgtaaaaaaaatcaaaaacaaaaacaaaaaaataaaaagcaaataatctttaaaaaatatgtacattttttaaatacaatgtactgacctgaaagtagtcaagttatctatagctactggttgataaaggcaacagaattgacagctcccacgtctgtaattaaatgtgtgaaactaacaaatggaaataatagagaaagattatttttctttactggtcatgttgtgacatcaatttgttttaaatgatgagaaaagaacttaaaggatttgctttttattatagtgcaaattaatattcaactactgaactgaaatagatttgcataagagttatcactatcaataatcatttgaaattcatttttcccagataaattagaatctccagtgataacaagcaagagttatctcctgcatttttgaaaaaaggttaaaataatagctatttcctataactagatcttgagattggacataaaccttatacgtgcaactttccttatctgattttaagtttcctttaactgtaaacatgagctaatgccacatgaaactaggaaaatacgatggaatttgaaaatgatgttagatagataaaagtaaggaaatcctagatttgaatgacatggaaatgtcacctagttcagtctcctgtaggggtacatagtgcctctagctgctatcatccttaatgatctccaaggaagaaagtagataaagatcctttcatcatcagttgtaggactgccctcaaccctgccccaaatattagatctttgaactctcttttagcagtaaatgttatgtaggtattaatatatatcttaaataacatatatgacagagatgatagaggtaataataataagtaatcactctccttattactctgaaaatattgtatatagcagtaatatcaaccacaatcaaaatgccatatattgagtatttgaatgggctagactctcctctgatcctttttttaaaagcatcattccactagtttccattgctattatccatgaagaaatagagacttagagaagataagtaattggctcatttccacagtttgtaagggacagagttgtaattcaggagcagaccacatacttcaaaccctcctgaccttgcatcatcatacagtaactgtgtatctattgaaaatctctagttaggtcccttctgagctttctgatctttgaattaattattttccatttctaacatttggccatagtgtcattttccagcattagtcacttacaaagatgtaggatgtgctattattttaaatccacattcatcaagaaaataggcctaattggagggaattaaggtagctgcaatttcctgatgattaagcactagaatatgttgctaggagaaactggagaattttcttttttgaaagtctgaaagaaaagtacaaataaggtttcaacaaactctaacttgaaccccagtttcctgatttgctaaatgaatggtttagagtaggtgatctcccttgggtctccccaaccctaacaacccacaagtctgtaactttaagtagcaattggatgttataacctctcaaggtcatttttagacttctatattttgcttcaatgattcttgactctctttggttcagctccacattctggagtttctttcaaatggagatctcataagagctattatttaacagtatcccaaatgtgcaatgtacagaattaaatacaaccatgcatttaagactttaacaatcatagttcatcagcactatgtgttctttctcctatttgattaaggttaaacaacaagatgatgtttcctcattgggtagcattttaaagtgtattgtgtatgtgacagatgagatcttataaatgcattaggcatgcttattttaatatctaagcatatgcaaaagttctagaaatattttacatgcaaatgtctggggctccactagggcccataatagaactccatactctgtgacttcaaagccctagtctcgacaactaatcacttggctatttccaaatcaaatttcttcaaacaaatcaaaggcatttgtcctacccaaaaaccaagttctgtggcaagtttcacatttcaaaatcaagctgcttattgagatattcatgcactgaaaaaggcacacagaatttcctttaggagatgagacacacctttttatgctccaatgaattagaaatttctcaaagagaattttaacaaattttctttacacacacacacacacacacacacacacatgcacttcatcttagcagtaaaagccaagattcagaatttcagcccaagagatctttcattttctgaaaggttatgagcccctgagatttcattcctttcagagtcataattactgtgttgcttctgagttgttaacaataacactgattaaaaggaagacaaaaaaaagaagagatcgttcacatacccgtattaagtggcttcacaaactaggagtatttttaacaccacaacatttgtggtaagtacaacaaagtgtgtaattcactgggaagcagaacagaaaagatgggaatgataatgtcaaataactcactttacccagggctccctgtgggcaaggcactgggccaagtcctccacaggcattgttgcatttaatacaacaatttttaacaatttttaataaaagccctccaatgaggcacttttactgtagcatttttacccatgaggaaactgaggttcagagaagttgaataacttgacaagagtcacccagactcccaagcctctgttcttaattgctcaactatgctactgccttttcttttatttttattattattattatactttaaattctagggcacatgtgcacaatgtgcaggtttgttacatatgtatacatgtgccatgctggtgtgctgcacccattaactcatcatttacattagttatatctcctaatgctatccctcccccctccccccaccccaccagaggcccgggtgtgtgatgttccccttcctgtgtccatctgttctcattgttcaattcccacctatgagtgagaacatgtggtgtttggttttttgtccttgcgacagtttgctgagaatgatagtttccagcttcatccatgtccctacaaaggacatgaacttatcctttttatggctgcatattgttccatggtgtatatgtgccacattttcttaatccagtctatcactgatggacatttgggttggttccaagtctttgctgttgtgaatagtgccgcaataaacatacgtgtgcatgtgtctttatagcagcatgatttgtaatccttcgggtatatacccagtaatgggatggctgggtcaaatggtatttctagttctagatccctgaagaatcgccatactgtcttccacaatggttgaactagtttacagtcccaccaacagtgtaaaagtgttcctatttctccacatcctctccagcacttgttctttcctgattttttaatgattgccattctaactggtgtgagatggtatctcattgtggctttgatttacatttctctgatggccagtgatgatgagcattttttcatgtgtctgttggctgcataagtgtcttcttttgagaagtgtctgttcatatcctttgcccactttttgatggggttgtttgtttttttcttgtaaatttgagttctttgtagattctggatattagccctttttcagataagtagattgcaaaaattttcttccattctgtaggttgcctgttcactctgatggtagtttcttttgctgtgcagaagctctttagtttaattagatcctatttgtcagttttggcttttgttgccattgctctttgtgttttagacatgaagtccttgcccatgcctatggcctgaatggtattgcctaagttttcttccagggtttttatggttttaggtctaacatttaagtcttcaatccatcttgaattaatttttgtatacggtgcaaggaaggcatccagtttcagctttctacatacggctagccagctttcccagcaccatttattaaatagggaatcctttccccatttcttgtttttgtcaggtttgtcaaagatcagatggttgtaaatgtgtggtattatttctgagggctctcttctgttccattagtctatatgtctgttttggtaccagtaccatgctgttttggttactgtagccttgtagcagagtttgaagtcaggtagcatgatgcctccagctttgttcttttggcttaggattgacttggcaatgtgggctcttttttggttccatatgaactttaaagtagttttttccaattctgtgaagaaagtcatttgtagcttaatggggatggcattgaatctataaattaccttgggcagtatggccattttcacaatattgattcttcctatccatgagcatggaatgttcttccatttgtttgtgtcctcttttatttcgttgagcagtggtttgtagttctccttgaagaggtccttcacatcccttgtaagttggatttctaggtattttattctctttgaagcaattgtgaatgggagttcactcatgatttggctctctgtttgtctgttattggtgtataagaatgcttgtgatttttgcacattgattttgtatcctgagactttgctgatgtttcttatcagcttaaggagattttgggctgagacaatggggttttctaaatatacaatcatgtcatctgcaaacagggacaatttgacttcctcttttcctaactgaataccctttctttctttctcctgcctgaatgccctggccagaacttccaacactatactgaataggagtggtgagagacgcatccctgtcttgtgccagttttcaaagggaatgcttccagtttttgcccattcagtatgatattggctgtgggtttgtcataaatagctcttattattttgagatacatcccatcaatacttaatttattgagagtttttagcatgaaaggctgttgaatttcgtcaaaggccttttctgcatctattgagataaccatgtggtagttgtctttggctctatttatatgctggattacgtttattgatttgcatacgtcaaaccagccttgcatcccagggaagaagcccacttgatcatggtggataagctttttgatgtgctgctggattcggtttgccagtattttactgaggatttttgcatcgatgttcatcagggatattggtctaaaattctctttttttgttgtgtgtctaccaggctttggtatcaggatgatgctggcctcataaaatgagttagggaggtttccctctttttctattgattggaatagtttcagaaggaatggtaccagctcctccttgtacctctggtagaattaggctgtgaatccatctggtcctggactttttttggttggtaggctattaattattgcctcaatttcagagcctgttattggtctattcagggattcaacttcttcctggtttagtcttgggaggatgtatgtgtccaggaatttatccatttcttctagattttctagtttatttgcatagaggtgtttataatattctctgatggttgtttgtatttctgtgggatcagtggtgatatcccctttatgattttttattgtgtctatttgattcttctctgttttcttctttattagtcttgctagtgatctatcaattttgttgatcctttcaaaaaactagctcctggattcattgatttttttgaagggttttttgtgtctctatctccttcagttcttctctgatcttagctatttcttgccttctgctagcttttgaatgtgtttgctctagcttctgtagttcttttaattgtgatgttagggtgtccattttagatctttcctgctttctcttgtggacatttagtactataaatttccctctacacactgctttgaacgtgtcccagagattctggtatgttgtgtctttgttctcattggtttcaaagaacatctttatttctgccttcattttgttatgcacccagtagtcattcaggagcaggttgttcagtttccatgtagttgagcagttttgagtgagtttcttaatcctgagttctggtttgattgcactgtgatctgagagacagtttgttataatttctgttcttttacatttgctaaggagtgctttacttccaactatgtggtcaattttggaataagtgcgatgtggtgatgagaagaatgtatattttgttgatttggggtggagatttctgtagatgtctattaggtctgcttggtgcagagctgagttcaattcctggatatccttgttaaccttctgtctcattgatctgtctaatgttgacagtggggtgttaaagtctcccattattattgtgtgggagtctaagtctctttgtaggtctctaaggacttgctttatgaatctgggtgctcctgtattgggtgcatatatatttaggatagttagctcttcttgttgaattgatccctttaccattatgtaatggccttctttgtctcttttcgtctttgttggtttaaagtctgttttatcagagactaagattgcaacccttgccttttttttgttttccctttgcttgatagatcttctgccatccctttattttgagcctatatgtgtctctgcatgtgagatggatctcctgaatacagcacactggtgagtcttgactctttatccaatttgccagtctgtgtcttttaattggggcatttagcccatttacatttaaggttaatattgttatgtgtgaatttgatcctgtcattatgatgttagctggttattttgctcgttagttgatgcagtttcttcctagcctcgatggtctttacaatttggcatgtttctgcagtggctcgtaccggttgttcctttccatgtttagtgcttccttcaggagctcttttagggcaggcctggtggtgacaaaatctctcagcatttgcttgtctgtaaaggattttatttctccttcatttgtgaagcttagtttggctggatatgaaattctggattgaaaattcttctctttaagaatgttgaatattggcccctactctcttctggcttgtagagtttctgccaagagatcagctgttagtctgatagccttccctttgtgggtaacccgacctttctctctggctgcccttaacattttttccttcatttcaactttggtgaaactgacaattatatgtcttggagtttctcttctaaaggagtatctttgtggtgttttctgcatttcctgaatttgaatgttggcctgcctcgctaggttgggggagttctcctggataatatcctgcagagtgttttccaacttggttccattctccccgtcactttcaggtacaccaatcagacatagatttggtcttttcacatagtcccatatttcttggaggctttgttcatttctttttgctctcttttctctaaacctctcttctcgcttcatttcattcatttgatcttcaatcactgttaccctttcttccagttgatcgaatcggctactgaagcttgtgcattcatcgcgtagttctcgtgccatggttttcagctccatcaggtcatttaaggacttctctacattggttgttctagttagccatttgtctaatcttttttcaaggtttttagcttctttgagatgggttcgaacttcctcctttagcttggagaagtttgatcatatgaagccttcttctctctacttgtcaaagtcattctccatccacctttgttccgttggctggcgaggagctgtgttactttggagggggagaggcactctgattttcagaattttcagcttttctgctctgtttttcccccatctttgtggttttgtctaccttggtctttgatgatggtgatgtacagatggggttttggtgtgggtgccctttctgtttgttagttttccttctaacagtcaggaccctcagctgcaggtctgttggagtttgctggaggtcaactccagaccctgtttgcctgggtatcagcagcggaggctgcagaacagagaagaataaaaccagaagtcctgggaagaagagtgatatagtctggatatttgtccctgcccaaatctcatgctgaaatataatcccccatgttggagctagggcctggtggaaggtgtttggatgataaagactgatccttcatgaatggcttgggacatcccctttgtggtaagtgagatcttgccaagttcacatgagatctggtcatttaaaagtgtgtggcacctccacccccactctctctcatttgctcctgcttttgtcatgtgatgtgccggctaccccttcaccttctgtgttgattgttaagttttctgaggcctccctagaagccaaccaggcgctagcaccatgcttcctgtaaagcccgcaaaaccatgagccgattaaaacacttctctttataaattacccaatctcaggtatttctttacagcaatgcaaaaacagccaatacaaagtggtaactaacaacatgaaaaccagggtaagcttagatccatgctgtatttatacaggctggcccagagccaacacttaatacatatttgttgaataaataaattcatgggtgaattcaagacattgtaaaataatttatggggcatactggccctttgacccccactagtcatccagtccattccagcatctgtcagttagttgtccatgagtctgtaatggaacctggcttccactcccagagccagctctgcacaaatttgtgaagaacaaaatgcctacctggcagcctctaccttctcttgttctttgctgggactgctattttccaagcctgtgttctctttcacgctggccattgactgtccagaactggctgttgactgtccagcaggcccagggcaagctccactcatagaaattgtgtgatcatctttcttcttcctttcttttctctattccagtcagaatttcagcatttctggaagcaattgcttgtttgcttatctgccttcttcttcacacagtaagatatgtgaagacaggagctgcatcattattatatctccagtgcctggcatcgtacttggaaaaaagtagttgtttagtcaacatttattacttaaattaatgaatgaatgcatggatggatgagtgttctccattgcaaacattgcttatcaagattgcaggtatttgagtactattactattaattgttatggtaatattgaacttatttggaagtattactgttggaagaaacatattttgcaggtgtgtgtgtgtgtgtgtaaaactattatgttcctcatttattcaacaaatatttattgagtatgtactatgtgacaggcactagggtatattattatgttgttgttgaccattatcttccaccatccctttaaatattttaggagagttctctctctctctctccctctcgctcttgctcttgctctctgtctctctcttcccctctttctctttttgcatgtggatgaaaattccaaaaggatctataattttctgcataatagacatcctgaaatgccttgacgtcagaaacacagtctcaattcaggaaatatgatttgcagttccatggaataatcaaaactctgaacttgagtaaatattaagccttctccacttccaaaggtggagccctgcttcaaggaggggtcacgggacttaggtgcgttctccgccctctccatgctgacctcttttctcacctgatctgcccagctcagggctggacaagaggtgggagggaagaaaagtggataggaccttagtctcactagttcttactcgctgttagttctctgagcctggcgtatagttccagttgtacctggttgaagaagcttttatgtcctcttcagagatcccccgacaggccatttctggtgattcttccctaagccccaggtagctggagggcacataccctcggtgtaaatcttccagacagactttcaggtatgatgtaagaaaatcccacacttgctgtctcactcacatggccctcatatgcttcatgggaaacatttacatccctgccccgacagcctctgggagttaggggtcagttaggcatcagtcctctctatctcctgacccgaaaatagcccacggacctttcgatgaccctcttgcatgtcccctctccagacctgaggtagaaataggaaggtggagatggctagagaggcgagagttttctgatgagattcctctcctgactctcctgctcaccacactctaggcctacttgaattctcaaagcagatagtaagttctaggatccagagacttaaaaaaaaatctgcatttagtaggttggccttggaaatttccattttattttgtagtctccttagacacttcaattttgggcacattattgtatatagtatatgatatatacttatatgttatatattatatataagttatatgagatatatatttatatatcaatatattgtatagatagtgtgtgtgtttctatgtatctcaagtgttttgaacacaacttgcggaatgcaataaaattattttgccacctctccctttaaaatatattcagttctttctctgctcctggatgaatactccacttgggcattctcagagcttttctaatatctcttggagaatagaaagtattctggtctcttaaagaataaaatgttgccacaatttgatattttaagtgtccagttccacgtaatagtcaaacctcccatcttcattcaaagttacacctactccccgtcttcccagtgggcctgcagtctgggaatatgatgcatttagtttcttttttttctttttttctttttttttgtttttttttgagacagagtttgactcttgttgcccaggctggagtgcaatggcgtgatctcagctcaccacaacatccacctcctgggttcaattgattctccttcctcagcctcccaagtagctgggattacggacatgcgccaccacgcccggctaattttttatttttagtagagatggggtttctccaagttggtcaggctggtctcgaactcccaacctcaggtgatccgcccaccttggccttccaaagtgctgggattacaggtgtgagccaccgcacctggccaatttcttttctttttcttgctcctcactgccctagctagctgctatttatagaccatttggagttgaagcaagagggttggaggagaggcaagatcttacatcaacagttttgctgtaagctggcctcatattttctgggtctggccaatattaaaactctttgtctcatgggatactttcagaggttctttgaaatgcccatcccaccactgtgctgggaaactttcagcagcacagttctcttgatacagatcatgtattttcctgacttgtttcctacttcttccacagtctctaggaattgggaggtggtgttcacccctggcttccacatgctgagttttcagtctcccatctcaaaggccccattgagcaggatggagtaagcacaacctcattctgagtgccttgtttgtaggcctgtgtttaatctaagggaaacataaaacctctactcctagaaactctaggagacacatctgccattgttaccactggaagtgagatgccagttcactatatctccccagctacagggcatagataccaaatttccaagagattttgtcagaatctctttcactagtagaagtgaaggggcaagcactcctttggaagagggacatcaaagtacagttcttgctaaagaaattccccctcaaattctttcttctctcaaaccttttatatcctcagtgtgcctgaattgtctacaagccatgtaattagtttttgttatctctttttcaagtcctacaggctggcctgttgcatagatcattttcgtctctgataaccgtgaaagctgagtgttcagccaaaatttccaattaaacatcctgatatgtacataattagatatacacaactgtcctgtggcatcagcagcatatattgttattcctgtttgatgtatgagtaacctaaagtacagacaagtgaagtaacctgcaccatgactagttgggttttctcactccatgtcttcactctttccctgactgagttaacacattgtccttttaagaacggactgaaggtccagcgagtagatgaacagaagtaaccttattggtgttgcacaggcctacaaaattactaagaagtccttacaacaaataaatataacacatatttcatgggaagtaaaataaaatagtagacttaatgatggtttagaataagtagtattaagtaaggaaaatagactgacataaaaaagaaacaaaaaaagactgaaaaatataggtatagtaaaaattaaaagaaaaacattatctattattgaaaattaagcatctgattatgtgataataaaagcttaacgtagtttgcccaggtttgaaagaaaactgattgacagtcgcttatcaccaataatgaaccccacctgtgccatagaaagtgtcttgggacaccaaaccacccgccaacccccatgttgtaacatcacagtagtacaaggatgtagatgcaccaacctaatttgaatgtgaagtagtccgtggtataggacagcatacgtacaagcccaccctgagggaaatactgagcaagaatctaggtgggctgaaaataagagaatgaataaaggaaggagaacagggttaaataaatatgtgagatgaagcatatggtttgagaagttttggggtcccacagatctattgcagggtactactggtaatgacactcatgaaccatgtaccttcacctgttctactaactattttcttgagtaaagaggtcatcttctggtgccttgggattgggactgcttaagtcatttctaaccctacattcttacttccctttagggttaggcctagaaggagaaagaggaaggacatgaaacaaagagttgacaccttctttttttttttttcttattttaaaggtaccatcagacctctcttatacttcattttacttcccaccacattcaatttcagattttttgttcaattgcttatatcatttagcaaccattcaaaattgaatgctgcctttggaaataaagaacatctgctctaaatcttgttgtgctggagattttgcaagaagctagagaggcagatgctgccatatagagttggcaaagtccaaaagacatgacttacaggcacaccaagcctagagaaactgataagaagtagtgctgcaaaataacccttagaggaggacttgtaaagcaaaggaatttagaggatactagaagtagaaatgtgatccaagtatgaaataaaaacacaatagctacagctataataccttcgcctctagtctcttttctcaagcctagtcttcactcctgattttgcactgtgatctcaaagtactgattcctgattttgattgaccatttctcaaatttcccctattaatttggaatcttctagttttctacatatgggccttcctggaccatacacagagaatgcctctctctctgttttaaatgggataacagatatagatgttatctccccagaataaaagagagtacaaatgttgggtctgacttctgtcttattattattcagtttggtctgatttcaggatctgtttaacatgtattgatttatctgttaggcccactttgtcattttaacatgcatattaaaaaaagaagaggtattgaattcagccattcagatctttttcaaattggaagcaacttcagaaatctccacaatctgaaaatgttcctgtgtgtagggccatttcctcaggggatatgaacagtttcatgaagatgtcccacacctccagatttgtcctctttttcatcagagctcctttcttatctttgcctgggcccttaggagggctttctgccatgtcagtatcctgtcaatttctacaactctatgaagtttttcacatagtagaatatattgtcaaaatgtcttgatgtcttattacaacctttacccaatctcggcagcaggatttctgaacacactcctggtgcctttttcctgatacatttattatctattgtgagagttaaatggtatctcgaccacatcctgttcttcctagaatccatatcaccttaaacatctagtagtctcatttctgacattctggtggggaaacctatttttaggtaaagttgcttatttttgttggaggaacgtttgattttactaagtctcttaagtttcttgaattaggttttctaatctatttgttcattcacaaatatttattgagtgtatattagagttctccaggggaataggactaataggatgtgtgcatgtgtatatatatatatatatatatatatatatatatatatatacacacacacacacacactttccctactttcttccacttattacccttggctgaagcatgaaaatatatttcatgtgtataaacacacacacacacacacacacacacacacacactttccctactttcttccacttattacccttggctgaagcataaaaatatatttcatgtgtatgcgcacacacacacacacacacacacacacacactttccctactttcttccacttattacccttggccgaagcatgaaaatatatttcatgtgtatgcacacacacacacacacacacacacatatatatgtaggaagagatttattgtgaactggctcatgtgattatggaaattgacaagttctaagatttgaagtcagcaagtaggaaaccccaaagagccaatggtatagttcccatttgaaggctggcaggcttgagactctgaaaaagcagatgtttcagtttgagtctgaaggctgaaaaacatgatgtcccagctcaaggcagtcaggcaggaggaaattccctcttactcatgagaaggtcagtctttttgttctattcagatcttcagcagattggatgaggcatcccccacattaggaagggcaatctgctttactcagtctactgattcaaatgttaatctcctcccaaaacaccctcacagacatgcccaggataatgtttgaccaaatacctgggtactccatgagccagtcaagttgacacataaattaaccgtaacatgtacatactgtgtgtatgccaggtacttacttaacagatccttttttactgttaattttattattataaatgtggctgagaaaacagtatattcttcgtaatattgttgcaaatgaatcaggcagatatttaagggtaggatttcttgttctgttgggaagatacgtatgactgcctttgtcatctcaaacaaagttgcaaaaagtgtcatgacttagggtaactaatggtaagtaccatggtaatcaatccctaaattttctagtttaatttaaaaaaaattatttctaacttacttcactgtctgatgaaggccaggaaactctcctaggtaacttacctccaagttgtagaattcaggcccctttcatgtgtttaaatataacctttttttcttcccctccaactccccttcctaaagataaacttttaaatcaataggtatctcacagtactttgtgaaggaaggtaaaataaagtcaactcgaaaattgtatatttaattgattactgacctctataatttaaaagctgcttgatcttggacaaataattctttttcattgatgatcttggaacccagtgggaaagaactacagaacgaaatggtaaatcaaatatcgaagatgttttgttacttgaggaatcttctgttaggttggtatagcggaggaaaccttccaattgagttttgagtttaagtaacaagttttgctcatcaagctgggcaatctgggcaaaccaattaaccactctgggctttggtttcctcatttgaaacttagcatgttagccacactgattttgctaacatcacttccaaatcaaaattgcaattattctagtagaccatctctttagatctggattaaggatgaggcctacttggaggtgaaggaatcaagtagaaagatgtgaaatggtccctccctccatatggaaaaatctgcctgagatttagacagacactattcaaaactgtaagtccactgagcaccaactgcggtacaaaaagttaagttcccaggtctcatttacagagtagtagctgcttgttagttatcacacgccagtgattcagctggagaagctaaggcagaaggcaattatgtaaccatcacaaaagggtatgggggaagcacttgaacccataccgggcattctggcttctggtcagatgcgagggatggattcaatgtcattttaatctttattcattgtttcaatctgttagaactgttatagtttggagctccatacagaatgcagatttgttcaaatgacttcccaagaacttgtagcaagagcacttggagccatcctggacaggcccatgctgtgcctcacacatgcacagcatcttcaaggggtcatacagaaactgcctccaaacctccccacccacttccactttgccacaaccccaagagaggacacccatctcaaaaaggtttgctttcctgtggagtaagaggtataattaaattgtgtcccagcagtgaaggttccttaatgataatgagccaaaactaattgtattgatttgtttatcaccggcttaggaggcccatcaaacaaatggactgagactatttccatattcttatctgttaggtaaatgagaaacaaatgacctctccctatgtctgcatcctgaagtcactgccctctaaggctgagtgctctatggcttcgggtgggagctttgtccaaagctggggccattctgccctctggcttcttcaaataggtgaagaaagttgaaaattttggtattcattcttctatttttcatttatgtagaaggatttgtttttaacagttacaatttggatccttgccaaaggtgccagatggcctgctttcttcgggagagctggtcatgagtattaataaccctaatttggaattctctgtggaaggggtagccacaagatttggagtgggaggaaatgtagaatcattgataacaagtgaattcagagaaaaagactcttgaatcttggtcaggagtgagacataacggtaggcaggcagctttggggggccacaggagaagcctgatgtacctgcacctacccctcttagtcttggggagccttcccaatctactgctccacaaattaagagaaatagagagaattaaaagagagctctggaagagccatagcaaagtccagagttaggttattgagctcaagtggaaagggataaaataaatggcttccagaatgtgaagaaattagctgcaagaatgtgaaactaaacagtggatctgtgactattcactttcactgagatgaaggagcaaagctcaacctagtatttagaaaagatttagggggacatagaaagaaaaccaacatctattgagttcgtgttctcctcccgttacttggctaaagagtggttaggagtgagcctgacatatattgtttctttaattcttttgcctagcccagcaggtaggtatacatatcccattttggagaggaggcagctatgtgtccagttaatgtttgtaaatttaaagccactatcatctgcatcaaagcccatactctcaacggctgaagactgatatctcactctccttcctcatctttccaatagaaagcaaggagttccattcagcacctctatgtgggcagtattgaagaggatgagcctttcttcctgtctcacttgcccttacgctcttcaaagggagggcctcatctgaaaagggagatagcctgaagccctttgactgcattgatcagggacaggaccatgatattgttacatacctaggtcaccctatggctgagctctctcttatgccctttacaccaatctgtgtcctgctccaagggccttgcccctgtgactcttattcagtaaacaggccacacagctgcttctggtagcccaggcagaactctgagcagaatcctggtctctgtttcagtttgcacctggtggccaagtcagagttgtaaagtcccaagatttaagtttagagaaggttgtcagagatcctttcatattccccaattccttttatcataaatacagctgatgctctattttcatcaccagtttgctctttctttttatcctcaattgattagattccctaggaaaagaggagtgagtacataggtaatttttctaaacaccaatctctactactgatgagacaaatggggagctttccaaatgtgagggtcattcaggtgacctgatggcttatggtgactgggatggtttaaagagaattttgattaacaggagaaagagttttttaggaaacctctaaacttgcttgaagctgatttagttgatcctgcaaagctgcgctatttttcacctaattcgagagtttattttagaggtattcatcttctaaaaatattttacctttaaccaccattttcggacataaactactttatcatttatgtagactttgaggagttaaaagcttttggtaaatcttgcctcctttgattcgcaacaaagcagaaaaaaaaaaaacggagaagaaatttcctctttgtaaaggaaaaaatttatttaattttaaatgacttgtccaaggtcacttggctggaaagtgtctgggaagagactctgcttttctgtgttctgagttggccttaaattattgcaatacttcacatacaaaaataaaaaagaaagataaatttgattatataagaatgtaagtctcctgcacagccataaatattaattaaacaatataagataaataacaaataggggagtaatttaccccactagacaacagggttaattttcttaatatataacaatctccttgaatagcaataaaatgtataaacaaccaaatacaaaataggcaaagaaggaaacatgcaattagtcaatgaccatgaaaagatgcttaaacttatatagttaaagaaatgccactgacttatcatttttcactaactggcataattaaaaatcttgatgtaatgttggtaagaatatggggaaaaactgttggtgggagtataatttgagacagcttttccggaagggaattggcagtatttattgtaacctattagtaatgtctgcaatatctggtagggtgtgaacattgagttccattagcagaaataaagtattcctggagttacaggataaagcacttatcaaaccacacagagtccaaatcatgcaaatcagaaggcttcctctctaatcaccttattaatcccctctcttagcttcctccacagctggtctttttatctttcaggtctttcccaggtttgcagcttccacgttctcggttctactcagttctcctttggtaggagcctgttttgttctttggaccttgggctttagtggaggggaggggtccttaggaccttcacagtgaaaatgtactcagtaataaaacatttcccttgctgattttgactactacttataattcaaatgtgctatgctaatagaacctccctcttagtgtgcaagagagaaaatgaaggaggaatgaaaaattataatcaattacaatataaagtggcccagaattgacagatggaggaatctattccatggatgtacttgcaacagtatctgaagatacatctgagaaagtaattgaaactttgtaattgcagaacataaaatgtaaatagccgtaaatagacaaccgacaaaataaagcatggtgaatttctaactggaatactatgcgatccttaagaatggggcagatcttccattatgctctaatagaaagttacctagaatacaaaagaatctcatcttcttcaatgtggagatttaaaaaaaaaagcctttggccaacttaaatatacatgcttttagaatcataaatgaaattattgaatgtttacttatatttaatttattaatctagttacacattcacatttaagattgcatatcatataacctattacttcagaaatatttctactttttgcatttcttgaatcagtattatatgaatacttcacatacatttttgacattagtcttttacaagctggagctgctttctgagtcatctgatacatattttttcagagtacattttccttatttccatctgttacttgagatacagcatttgttgacccacatatgatgctatcactggcaattttatcacaaactacaagtacccattcatagaacatcagtaaaactgttttattaagattcattctgtagggctgtatgttggatctcacaacacaactacttattctgttgctttgtaaataatctttgaaaggcttgtttttacaattttaagcttgaagctttttgtcttactccaagaaataaagactaatctgtgataaatttattttccccttttaatcaatgtcacaggtgaccacaataggtatacaaactcatgttgaccgagattgtttcaggctaatgtgtctttcccaaacaataatctttagttcaaaattaagtaataaagaaagcttctcataatctcagagactttgcaaagacctggtgataattccctttcttttctgaaagataattttagcagagtaacctcatcatttactcaggcatttgtggaatgtatatagatgtacactcaagtattcaagatatattctgaagtaaaaggacagattgtagaatagtatttacagtgaacccatttgtagaaaataaaaaggctacaccagtaaatgttatctataattatatgtaactacatattcataaacccttcctggaataatacattgtgattaatcctaaggtagtggggggaagaccccaggaggaggaggaagactggaatgttttctctttttacccttgttccaatgttgtcagtgatgtattaaatgaaaattggttttaaaatacatgcctttccttttacttcctcccctctccctccccctacaagctatttctcatttggagttttgcttgctattatcttgagccaaattaaaccagtgatctcctgatggaaaaggccagagcctgttcaatgactccagcccctttcctgtccattctcctctggagccatcaccaaagccctggtcacactctgtaatttgtaaatcctgaaattgtggtttgcaaggcaaatgattcagagcaagggctttatcccgggatcttatcctcctagttgcacaaaaacaaacaccagggacaagaaaattccttccttccttccttctttcttttttcgtcttctctttttattctgggtaaagggagctaaaaagcaggagaggaggtcagtttgtggaaaatgaactgaaggaagtgaattgtaagagatgggtcaaagaaagaaaaaaaaccacgcctaataaggaagctaactgcagtttttccaaataaattaaacgaaagataaagaggcaggctatcaaggcagcctaaataaggacacctcaaaaggaagaacgaggaacaaagcttcagaagcttcaacaggagaacaaagaggaagaggaagcggtgtttaatgagtgcacagtatgaagccggaggctgactgctttggtttgctgttagaatctccagctaacagtgcctaaacaataaaagtttatttcttcttaagacaagcagtctggatataggcagtcactggaattgattcaacaaatcaatgaaatcagagctcctgatcagttcagcaatttctgtgatacttttctcctcttcaatgttcccacgttctgagacggctgcagcagcatcaagcatcacatactcccacaatccactttcaaagccttgagacaaagggcaacacaggccagtgttgctcctcctgtgcgcctcttatcaggaaaaaaaatatctttctcagagccccacagcagcctccctttatatctcatgggccatagctctgtcacaagctcaccctgttccagggattgcctctacctatttgagatcaagggatctcttcctgttacctaaagaaaaattagagcactgttaattagcaagaaaaggtgatgtcttggaaaaagcagccaacaacttctgccacattaaataatctccataaaccaccttttgaggtaactattattattgccatttgaattagtttgctagggttgccaaagaaaaagaccacaaactgggtgcctgaaacatcagaagtttattgtctcatagttctgaagactagaagtccaaaatctggatgtcagcagagttggttctttctgagggctgtgaggggcagatttgctctagacctctctctttggcttgttaatgagtcttttcactatatctcttcacataatcttccttctctgcatgtctgtgtccagatttcctccttttatagagacagcagtcagattggattaaggcccatcctaacaaccaagtaagttaacaatttcaacttaattacctctataaagaccctatctccactttctgaagttggggggtaagtatttagacgtataaattttaaaagggcacaattcaacctgtaacaccattgtacagaagaaaccgggtagtagagattagataacttgcccaagaccacagtagctccaaacgtacacctgccttacaacaaacttgtgttctttccaccataacacaagaaaacaaaagttaataagtgagaaatagagtgaatgaacaatactaaaatatttctaatgcatatgacagaggtgtaggactattataaggatgtgtgggcaaaaatacagattttcagctaaaacattttaattcgtatctcagtgtaggtaaggttgaaattaagagttgtacgctaaataacctgaaacggaacttacaagttgggtgctttaagctctatacaccaaaatcaatgaagccatgaaaagaatataaggaagggggcagagaggataactggctggccagcactgtcagcaagcaggatttgccaaagagaaagtcatccaatggcaacacctctctcagagctcactctcttgccttcacttctttgttctgaatgtgtgtcccactgattctcgcattcctacaaacttgcatcctgactgcccaactcccctccatttggcttagctctgccgcagtcaggcaggaagaacgcccactggggcctgctcatttgcttttacagttttataccactgcaacttgctatgcctctctttcccacatctagggcaccctttagataggaatgctgggttcattcctgctgaggtgttactgactggtaatagcaaaatctgttcctgtcttgcaggatgaatgtgtacttttacagagaatacagtctcaattcaaagaattcttaatatttttttcccacaaagtgggtagtctaataagatgtagaggagaaggagctttgagaaagctggagaagtcttgaaatctggacaagtgtgctagacactgttagtgactgcctgctctaaacattctgttcattgcagtagcaatagtagtagtagtaatcagctgaaatgtgtgtttggtcctaatcaggactgaataatctggaaagtctttacaaactcggctcaaccatcccctcttccagaaggcttccctgactacatcttgttcactttctgggttggttgtcctctatggcatcctcacagttccctatccattctaatgcattgtcactgttggtttattggacattcttccccaggcaaccacaaacttttcagaggaaggaactgggttttttatctctatatggcaagtaccaagcccagaacctggcatgttgctgatatttgtattaggttcctaggctgccatagaaaattcggtggcttaaaacaacagaaatttattctgtcacagttctggagaccagaattcagaaatcaaggtgtcagcaatgttggtttcttctggaggctctgagaggcaatgtgtcccatgcctttctcctaaattctatggctgctgactacacctggcattccttggcataaagcagtgtaactcccatctctgcctccttcttcacatggaatttccctgtgtgtctttttatctgtttcttcttctcttataagaacttgtgattggatttaaggcccaccctaatccagggttatatcatctaataatgatccttaccttaattacatctgcaaaggcctttattccatgtaagacgacattctgaggttctgggtggacatagttttggggagccaccattcaacctgatacaatattgaataagtatctggggaataaataaatgaacagtcaacatggctccaatatctagtgtgaagaattatactttcataccacatgaaagtaatctgtatttaaagtatacaagaaacccaactgatgctcgaggaacctttatatgcttgtgttaaatggtaagactaagttactttgggctttcactgtatagagtcttagatttgaaagaacctaatgtgttctttggccctggaatgtgatagatcatattaaagtgaggttttaatattgtaagatttatatgatttgctatttgagcttttctaaactattaagtagtagtatctattagtgtcaatactaggtattcagttattttaataagaagcatattaataggatcacatgcactgtcatttttttctatcgtacttcagatgtggcctcattcaaggatagagcagtcagaggcttccagtatttctctctcatacggtaatttcacacttgaaactcagcatacacaatgaggaaatagatatctttccgtcatagtcctgctaaacagaaaacaattctctattagttaatgtggccaaatattttctggtacctagtagaagcattatttttagtagcgatagaagcaggaaatgggaagccaaagctttttttttttttcagacagagtctcgctctgtcacccaggctggagtgcagaggcgcggtctcagctcactgcaacctctgcctcccgggttcaagcaatttcctgcctcagtctcccgagtagctgggactacaggtgcgtgccaccatgcccagctaattttttgtatttttactagagatggggtttcaccatgttggccaggatggtctcgatctcctgacctagtgatccacccaccttggcttcccaaagtgctgggattacaggcatgagccactgcgcctggccaccaaaactatttttaaaatttgggtatatgtcaaatagcatttagacattaatcaaactacagcttgtcctacatcatcaattattgacaccacagggaatgattgtcattcacttataaatagctccaagcaaaacctagacagggtccagaatggcaagactcagtctaactttagaattttatttccaaagaagcaaagatctcaataagtttggaagtagaatcacctcaacatccctggagaagcagatctagtccctctggctgtgcattgcttgaaatgcagtgttgtatcatatattaaaacactgaaaatggagttcagcatggagagccctaggctacactatcatgaatctttcacctttgctaatcttaaagtcagaaataattttaaaatagatgcatggggcaacgtgtgcatggggaaagtgggtgcagcttaaatttcagtgccaggaacagtgtcgatttggccattcatacctgtcaatagctgctgagggtaaccttcttatttaactgcagagaaaaaaaaagatgaaatatgttcatctcctaccttgagacataatcattatttaataaggcactatatatgaaacatgggctttatttgacacatggatatgctaataagctccagaatattgctaggctctttgaaatggaggctgtgagatcatgatagtcagtcgcttgtttacaatacatgtagaaccctttactctgctgaatcttgaggcccttgcaaatttgtattagctgatgtctacgtggtgcagggaaagcaaccatttctggtactactgacatacgacagaagtgatattgcattaaaatggaaaagaaagagaagactcatatcccaggaaggaaggaatctgggcctgtctcaggcaaaactgtgaattaaatgaaagatctctaaaacttcatatcttggcctaatggtcacttttttctttcagtggtctgcttaagcagattttaattgccctgaggctttctttccctggctgtgtgcatcttcccagtcacctttgctgaggttatcaacatagcaaaaccctccctaggttgtgccacatgctccagactttcccaacccatttctcaaaaatatcaagtaattactgcgtttggttccatattgggggatttatctaggaatatatcgacatgcttttctttccaagacacatttatacttgaaggtagactgcgaagttttattccaaaggagacactaataaagggcgtttcaggttccaggcaggtgccttggctagtgaaaagaggcagaccgcggtagacaatatgtctaaagaagcttggatcagatgacaacactcaaatcatgtcacaaaggcaatcagctgtcacctctccatgtagggaaggccgtggagaaatgactggaagtcaatagaagtaaatatatatgaatgttgacatagtggagtggagccttggagcatgagtgaaatagcagaaataaatatttaaagtgaacatttctttgggaacaatgaaaagtgacatgcagttgagctctggcagaagttttcagaaagaagcaagcaggatcaaacacatgcctctgctgttcattatttcacaaacagacaaaactcaaattctgactagtccagagctatatcgctcaggagctgctgctagcttcaatcctgttggtcctaagtataaggtaggtgaacttggagggagaggtcgctggaggaggtaatatggtcaagtaaccagtgacacagctcaagaaatcatctttattggacatatttattcttttcacttcttttttccttttcttttttaaaataaaacagctttattaggatataattcacatgctatataatttacccatttaaagtgtataattcaatggcttttagtatattcagagttgtgcaatcattctcacaatcaattttaggacactttcaccactccaaaattaagccgcatacctcttagccaacacctctcaggccccccaacacttgctgggcccttgaaaccaccaatctactttctgtctctataggtttgcctattctggctattccatataaatgcactgataaatatgtggtctattgtgagtgacgtaatgttttcaaggttcgtctgtattgtagcatgtatctgtacttcattcatttttatggctaagttatactctgtcatattatggaaataccacagttcatttatccactcatcctctgacagacatttgggttatttctactttttggctattattatcatgtggttatgaacattcctttacaactctttgtgtggacacaggttttcctttctcttgggtaaatacctagaagtggaattgttaggtcatatgagaattttatgtgtaggcttttgtggaagtgctagactgtttttcaaagcagctgtacccttatacattctcaccagcagtgtacaagggttccaatttctccacattctaaccaatatttgctattacttgtcttttttattatagccatcctagtggatgtgaagcagcacctcactgtggttttgatttggactttcctgttggctaataatgttgagcgtcttttcatgtgcttattggctcctttcacttctttaccttgactagtagactcgccttagatcagcggtttccaacctttttggcaccagggactggtttcatggaagaaaaattttccatgaggtgtggatgtgggggatagcgttagattctcataaggagtgcacaacctagatccgtcgcacgcagagtacacaacaggattcgtgctcctgtgagaatctaatgctgctgctgatctgacaggagatggaactcaggcagtaatgctcgcttgcccaccgctcacctactgctgtgttgcccagttcctaacaggccagggacaggtaccggtctgtggccctagggttagggactcctgccttagaggaatttggcccactactatagttatataatgacaggaaaatttcaacattctaatctctgtggacaggacagctcccagagtctgcacagaaagacctaggaaggcagcattgtgtttgaagttcggcacctgggacccagtattgctgaagcataaccccccggagtctacccctacagccccagtgttgctgaggaaggcatccaaagagacttcgggaagggtagtcagagaatgcagagagcttcacagcaagcaccagccaggggcttagctggaccccaggtttctaggtgatcatcaggtagcatatactctgtgatcttctttcatcctccccatttattctctacagttttacagctaccggaacacactgtcacttttacattatggaaaagttgaaaatattcagctgatttctgagaaactgggcatatttctcattgaagaaccaataagaaaattttttgtcacatcaaagtagacataaatttccaggataaaccagatggtgagtttagagtgtcaacttagtaaggacaatatgcatttagaataaatactttaccaagtaggacagaataggctaggtctgggatgcttctaacatgagtctaagagttgaacagcttgtcatttttcaactcgtcgataaatgggaatggaattatttattctggaaacaccaacagagttgttcgtcaattgttgatgtagtgtaaaatgattttaatgcttgtggtctaagaaagtatctctatcactcagtgcagtctaggacaaataaacaggcaaacaaacaggaaaacacaaattggaagataaataaaaggggcagcaggcagtgagtagttgttacctaatttgcattcaaagaatggtttaaagaatattggcaggaatccagtaaactagcttgagtcagatgaacttcatattaagaatgggtggaaatttataatattggggtttggctgatgctacaggattttcttggtcagaatcataaaaagatagagaagccatgctaattctgacactttgaaatgtaagagcagttcttgaggtattgaatctacatgaaagggatggaataaactggaaatgatttataccaacgagatttgagttaggggaatgtgttagttttctattgctgctataacaaattatcaccaactttgtggtttaaaacaacacaaagttattttatacagttcgaagttagaagtctaaaatgggttgttagggctgcattccttctggaagatccaagggagaatctatttctttttccagcaaaaaatgcaagactgcctacatccttggctcacggccccactccaccaatttctgcttccattctcacatatcttttcctcacattgctgtttctctatttctcttttaaggacccccatggttacattgggccagaataatccttcaaattcaagatccttaatttaattgcacctatgaagtcctttttggcatgtaaagcaacatattcacaggtttcaagtattagagtggggatatctttagggagctattattctatctaacacagggaaaaaaaggattttctcagtcctttaagtatcagcctgacggtgacagaaagtaagtgtttgttttctgagggctgagactgatcctgtagggcacagttaaaacatagtggttctgccctgaagtgtcatctgctgctgatgaaatcaaaggcttggatggcatagcttttccctgttagagtaagtaatcacagcattaataggtaggacatgatttaacccacagcatactaggagctctggccaacaactttaaaatgggtcttcaccatttggaggcatgattatgagctaaaaatactacgtgtaagatattgtggcctttgatttctacccttcaccaaaaatatcttgaggactttgtgccaggtgggtgctaggaaaaaaaaaaatgagacacagcctttgcagtctagaagccagcagccagttattacacataaaacacaagaacatattatataggaacaatagagtgaggtatggaaccagagagacggaacctagaaggatggtccaagaagtagaaagtgaagacagagtatagtggacccaagaataataataacaacagacagttatatggtgtttcctctaggctatgcactatctcagatctgtacacagatgctccttgacttatgatggggttatatttggataaacccattggaagttgaaaatagtggaagtcaaaaatgcattcaatactgtacacctaaattaccaaacatcatagctaaacctggcttaccggaaacatgctcagaacacttaaattagcctacggttggacaaaaatcactaagcacaatgtgcattttatgatgaagtgatgaatgtctcatgtaatctgttaaatactgtacaggaagtgaaaaccagaatggtcgtatgagtgctcaaagtacagtttctactgaatgcatgttgcttttgcataatcataaaattaaaaaaactgtaggtcaaaccatcataaattggggactatctgtatgtattaactcatttaatcctcataacccaagcctggtaaattggcttcccagatggggtttctcaaacacatctctattttccctcccagctgttaccactgtagttcaggacatcagggtcttttgccaaagcttcctatctagtgtccctgccctctactcttatcctacaccaaagtgatccatttataaagtaaatctaactgtgtgacttaaaacccttcaaatcttgctcagaagagagctgacatcctttaactctcatttgaagccctcaagtgtctgacctcagtcctcctctctgacctcacctccaccttctcttttccacccactctcatcagttacaatccagaaagagtggattccgcctcctggcaggcagctgtgctgtttcaggcccatggacctgcctccaccttttaccttcccccactcactaactcctgctgctgctcacatccctagcctgtgtgcggtgcccctcccctttcctcccacagtgacctgagcacagctcgggtatttatgcctctgttctccccggtaggtttaaagattctttagagcaaagatacagaattttcatcttcccttttccagcccttgtgcagtacctggcacataaaagccattcagccaatgtttgttaaattcagctaaactgagcaggaaacgtctcccttgtgtgtggctgtgcctttttgccattcagagagaggcagtacaatcatggtgatttgaggacacttaaaaatggaaagggctccacatcgaaggcctcttgaatatagtgaaaatgaatatcaaaatcaatatgccgttcagtttagggatatgaataaatgatttcaaatgaattcaattttcctctcaacattaagtggtgaaggaaaataaattattggataatgtatttgaagtaatagctctcttctaactgttcctacaatttgttgttacttgtctttggacctctgtgtgtcatgtgatactgtgtgtcatggcgatctgagaaatatttatctctcctcaccttctaaaggtcagagactgtatcttaggatccaagtttggaattatttcctgacattaatctcttcttcctctgtgctcccataacataatttcttctttttaaatggttgttttaaatagaaaaatgtcgtacttgaatattttgatttttatgggggaaaaatttactactatgaaaaaaatagaataaaactatgtgaaagaacgcctccatttctccttcaaacccacactgctgtccacaggtaatccctaataagagtctgttcctttttctatgcatgtatgcatccatgcatacaccatgtatttatgtgttgttttttgttgcttcttgttagtagataaaattaaaattatactctcagtattattctaccacttgagtttttttaagatgatacttctaaaacttttttattgacacattttataattacacatatttatggtgtacaatttgatattttgatacacatatgttgtataatgatcaaatcaaggtgtttagtgtatccatcacttcacagtggtggaacattcaaaagcttctcttctagatatttggtaatacacaataccatcctattaacaattgtcacctactgtgcaatagaacaccaggacttattcctcctgtctaattgtaactttgtacccgttgaccagcctctctctatcctcccttcttgctcctctccctaatctctggtaaccactgttttactctctgcttctattatatcaactctttatttatatacacacaaacacacacactttttttcttttcgataacagccattctaaatggagcaaggtgatgatatcgcattgtggttttgatttgcatttccctgattattaatgctgtcaagcattttttcatgtgcctattggccatttgtgtgtctcactttttcttttgaaaaatatctatttaggtatattgggttttttttcttttgtttaagtccctaatatattctggatattaactccttgtcgaatgtatagtttacaaatattttctcccattctataggttgtctcttctctttgttaattgtttttcttgctgtgcaaaaccttttaagtttgacataattctatttgtctatttttgcttttgtgtcctatgcttttgaggtcttatttttaaaatccctgccatgcccaatgttgtaaagcattccccctatgttttcttctagtagtttcatagttatagactttacaattagcctttaatccatttagttggattttgcatgtggtgagaagtaagggtctagactcattcttctgctcgtggatatcctatttttccagcactgtttatttaaaacactgtcttttctataatgtgtattcttggcacctctgttgaaaataagttgaatgtagctaggtgaatttatttctgggctctctattgtgttccattgatctgtgtgtctgcttatatgttagtaccataatgtcttggtacttacagctttgtaatctattttaaagtcaggtagtgtgatgcctccagctttgttctttttgttcaggattgctttagctatgtcgggccttttgtggttccatataaatgttaggattttctttttctatttctttattttgataagaatttggtattttggtattttggtatttggtgttttgataagaattgcattacatctgtggataactttgggtagtatggacattttaacaatatcaattcttctaatctataaatatgtgatatctttccatttacttgtgtcttcctctatttctttcctcagcgttttatagttttcagtgtagagatctatcacttccttagttaagtttattcctagacatcttaatttttggaaactattgtaaatggaattgttttcctgaattctttttcagatagttggcttctagcatacagaaatgctactgatttttttgtatgttgatttagtgtgctgtgacttcactgaattcatttattagttttaacagttttgttgtggaatctttagggttttctatacataaaatcatgtcatttgtaaatgggaatagtttgactttcttgtttccaaattgcatgccttttatttcttcctcttgactagttgctctggcaagcacattcagtattgtgttgtgggtttgtcatatgtggcctttcctgtgttgaggtacataccttttatacttaatttgtggagagtttttatcacgaagggtgttgaatattgccagaagctttttctccatttatttaaatgatcatatggtttttttcctcttactttttgttaatgtggttgtatggtttggatatggtttgtttgtccctaccaaaggtcatgttgaaattggatccccagtgtggcagcactggaaagtggggcctagtggtaggggtgttttggttatgggacagatctctcatgaatgacttggttctattctcagtgagttctcactctctcaggagtggactggttcttgcagaaatggataagttccagtgagagtgggttgtcataatgccaggatgcccctcaggattccctctctttacacacatatgctcttcctttgactttccctgccatgttgtgacgcagcaaaagcccttgcaaaagccaagcatgcttttgaacttctcagcttgcagaactatgagctaaataaaccttttttctttataaattacccagtctctggtattctcttattacaacaccaaataaactaagacagtggtgtgtcacatttgttgatttgcatatgttgaaccattcttgcatctctgggataaattccacttgaacacagtaattgatctttttaatatgctactatattctgtttgctagtttcatgttgagaatttttatgtctatgtttatcaggaatattggactttagttttctttttttgttgtgtccttgtgtggctttggaatcagggtaatgctgcctcataaaattagtttggaagtatttcctagtcttctattttctggaatagtgtgacaagcatcagtattgttctttaaatgtttgatagaattcagcagtgaagccatcaggctgggctttgtattttattttttgatggagggtattttattactgattcaatttcctcactcatcattgatctgtccaaattttcagtttcttcataatttaatcttacaatccttcgtatttctgtgatgtcagttgtagtgtcaccttgttcatctctgacttgaagttttgggatcttatcatattttttcatagactagctaaatgtttgtttattttatctttaaaaaaaccaactcttttgttgttttttttaattttttagtctctgtttatttctgctctgagctttattatttcctttcttctaccaattctggcttagtttcttcttgtttgtctattttcttgaggtgtttggttaagttatttatcaggaatcttccttattttttgatgtaggcatttattgctatgaactttcctcttagaactgtttttgctgtgttccataagttttggtatgatgtgtttccattctcatttgtctcaaggaatttttaaatttccctttcgtctacttacccagttggttactttggagcatgttatttaatttccatgtatttgtaagatttccaaagtttttctcgttgttgatttctaggtttgtaccattatggtctgaaaagatacttgatatgatctctatgttcttaaatttttaagtcttgttttgtagactgcagtatcatttatcctggatgttctattttcagttgagaagaatgtgcattctgtagctgttggatggaatgttttgtaaatacctgttaggttcatttagtctgtagtgtagtttaatatgatgtttctttgttgattttctgtctgtatgatctgttcattgttgacagtggagtgttaaagtccgatactattattgtattgctgtctatctctccctttagaactaataatacgtactttatatatctgagtgctccaagctggctgtgcaaccatggatgggcatgcatatgctggaaagctgcacagtgcctttctccagtaatgtagggctgacttcaagccagctgttgtgctggaaatgggtatgtgcaggccaagaggcctttctgatgtcaaattctttgagttatttttttaaaatgttacaatatgccttggagattatagatatacatacatacatgtatgtgtgtatacatatattatacatttccttcttttttctattgtttgcttttgatgagcatatgcttttcctgtttgcttttgtttggtttggcttaaactttttaaaataggtttttataattggcaattaaaaatatacttttttgctattaatgagtatatatgtctttcgtataaatgcaagcttttttacacaaaagatttctagaagtgagcttgctatgtcagaggatatttgcattttatattttgatagctacactctgacagatagcttcaaaaagaactgtgcttagataacatctgagcttgctcttttcaccacattttcaaaaatagtatcaacctttttcttatattctcaatctaatgagcaaaaagttactgtcttcttattttaatttttattccctctgctagtgagttaacaaacaaacacagcatatgtctcttagttcgtgtatattttctcttgtaaatggtcctttgttcagatttctattagcttgtctttatatttttttgaaagagctctgtataaaatgaatattaaacctttgtatattatagatgttatgactgtttcctcctagttatcttttaactttgttcactgtagctttttccacatggaaattaaaatatatgtatagtaaaatctttcagtcttataaaaattttttctaagtccttttatcattttctttttaaatttgatatctggtgagacagattccaattaattatggcataatttaaaaatttctttgggattcttgcctattttattgttccatataaaccaacaaattatctgtttaaattgattaataatcattaggattttgattgaaattttatctatagatttatatagaatcaatacattaaaatatggactctccccacccaagaacacaatatattgttttatatgttcaaggctttttgaatgtcttatcatacaattttttcatttttaatatagatcttacacatttttggtacctctatgtttatgtgttttaatgtcttattgttctagtcaatatgactttttaagtataattttaatgttttatttttgtcatatagtcaagctgatttttaaaattttatctaacttttatatagtttttcataaacttgtcaattttttatagattttatttattcttgcagagtcgccttttgctgtgattaatcaagccaaccttgattaattaaaccttttaaatttaaaccttttaaaggcttactgtaaattattgctgtgtttattttccacccttattaattatttccttcaactttgttttactttctttgttgtttattaagttgattatttaattattttcaacatttttgctattaattggtacatttttaaggctacttatttttcctttgagtttatctttgcagtagcctattttagtatatattcacagcgactcagtgattttaattttgaattcctcttacagtcaagatttattaaaattgagattttaaatgtatgcaattggagagttttcttgtcgttctttgtttttgcaggaaggaggtgttcatttttactatttatttatttagccagaaagtgtggaccataatttctactgttacaaatgtgtaaaattattttgtggccttatgtagtcaatcttttaaaatattctgtaactattaaaaataagtcatttttgtttgttggatataacttttaatattgaataatctatattgctgtttatttctgactacttcatatcattgatttataatttgtgtccaaatacaacagtgaacttgtttatttctccttataaaattttaataagttgaccttatatttttgatgcatgttgctaagtacctatgatgtattatcttaatattttttaattattttcatcttatactcaagtatatttatgattgataggaccagtcttgatttattagtgaatcttcatgttcgaccattctatgtcattttcatgtaattatgattctagtaaagagaatgtagctaaaattattatgtatatctgacatggcttctatttttaatgaggagttttacttaattcacatttgttgtaatgatcgaaatatttaatcatgtataacctgcttgtttatttttcttcttcttttgtattaagcttattttattagggtattttttcttcattctttctttagtaattctgcattccatttttctcacatcgtgtttgtttaaatacagtatgtaaacttacaatttccaattctatgttgacattaagtatgtcctaaaattgctctttctgaattagattctcagtaatttttcattttctttctacttccctgccccttcctgtgttttgttaaaatgatcatcaacatatatattcagcttatttgttctttaaagccattttcttaggaattatttcctggaaattgccctttaaagtgtcatttagtgggggcgcagtggctcatgcctgtaatcccagcactttgggaggccaaggcgggcggattactggaggtcagaagttcaagaccagcctgaccaacatggtgaaaccctgtctctactaaaaatacaaaaaaattagccaagcattgtgatgcacgcctatagcctagctactcaggaggctaaggcaggagaatcacttgaacccggaaggcagaggttgcagtgagccaagatcgtgccacgaaactctgtctggaaaaaaataaaataaaatgtatcacttagctttattatcaatactttttagacttaaaaacatgcattctggttaaattgttgaccgtctttccttgtatctcacagtgtcatctttttttagatttttttttgtttttcctcaaatatatcctcaaatattttcttcaaaagactcctattagataaagcttcctgagaccctgtgactgaaaatgttacctcagccttcacacattaaagataatttcaatgtaaaattctaggttaaaaattatgttttctcagaattttgaagacatgcttctacagtctctttgcatccacattttctgatgaagataatggtatcaatcagttccttgtttctttgcaaggaattattcactgcactgtccaaaacacagccacctagcacatatgtctcttgaacctttctttgaaatgtgagtagtagactgacgaactgaattttaaaatttcttaaattttaattaatttaaacttaaatgtaaatagccatgtgtagctagtgattagtgcagctctacatcacgaagatacgtatagttggttcattaatctttgtggatatgcagtatgggcattctccatgagttaattcatttttcatacttttcaaccctttgtcatctgtactcttttctaggagaatccctcattttaatcttctattttattattctagtttcaactattctgctgatttattaagtttatggtaattgtgcttttaatttccaaggattctgcccattaattttttatagcagccagttgcttttatcataaatatttatgaaaattttaaaaagtgtataaatatatataaatatatacatgcatgcatgcacacacactgtatgtatattttcatatatatttatacactttaaaaattatatatttttacacttatatacactgaagtgtatatatttttaaatatacactttaaaaaattaaatacatatttccattttatttctgtttcctctatattaactctcattttcttagtggttacctttttgcttgttgagtcagtgactcttttttcatactgtgattctatcaaatgtttagtaattgattatgtcttgatggaaaagtattgatagtgtcatcttatttactcagcacaaatgagaagtaatggtaaatacaggtactagtaacaggagccttcgttctatgtactagacaagggaagagagacacataaagggcccctctataaggataggtcatagcctcttgtattggcacaggagaccataagttatcagaggtacttctcagaattcccattttataaagctgtatttacagcataatcctagaagcaaacattgaggtcagctgctctgaggacagggaattggcatagtatacacacacataccatacacacacatacacacatacacacacacacacaataataaacatactggtccaaccacccatagttttctacttctagccttcactactacttctgatcttgtgcttatttgtggttcatctggaaaaaattacttactttggaggctcttttatctgcatggcttatagatttcagagacctggctaagttttttttttaattggttgcattgagatttagaattggtatatatcgtcctggtggacggacaccttatcactgtgatatgaccttgtttattccaagtaatgctttctgtttgactaatatcaatatagccataccagttttatttggtttgtaactacatggtacacagtaccactctactgttgtacacacatataaattttaaaaattagcttgaaaatattaatcttctacttgaattattttgtttgttaatgtacttattgatgtatttggatttatatccaccttattattatttagcctacctgatcttttttaaatgcctttggtttttctttcttttagattaatcaggtgatttgtcattcaatagtttattatcttattatttttacattttaaacaattcttttaatgcctaagagataaaaatatgtacccatgtcttattacagcttaattcaaatgattgctttcacctcttccacaataaggatacaaccttataacactttaacttcatttatccctttggtattattgtcatgtattttaattttatatatattttaaattccccaaacataaacattgttattttgtgccatatatatacagacatatatatatatatacacacacacacgcgcgtacatacatgcatatacacacacacacacaaacacacatggagaggaaaagaaggtgggagaaagggagggagattgatagagagcctcactatgttgctaagtgggcaactgagcttatctcaaaacttctgggctcaagcaaaccccctgccttagcttcttgaatagctgggattacagttgtgagccatggcacctggcttatattcacttatgtttacccaagtatttatctttgtattgctcttcattttttccttcatttctgcattttcctttatgattgattatgttatttatgaagaagaagttgacttaatatttcctttagtacagtcctaccaagaggaattgttttgatttttgtttttctggaaatattagtatttcatatttatttttgagatatattttcattgagtgtacaatgctagttgacatttatttttagcatttaaaaaatattccaggccaggcgtggtggctcacacctgtaatcctagcactttgggaggccgaggcaggtggattgcctgagctcaggagttcgagaccagcctgggcaacacggtgaaaccccgtctctactaaaatacaaaaaattagctggatgtggtggcatgcacctgtagtcccagctactcgggaggctgaggcaagagaattgcttgaactcaggaactcaggaggtggaggttgcagtgagctgggatcccaccactgcactccagcctgggtgcctgggtgacagagtgagactccatttctaaaaaaaaaaaaaaaaaacaccattctaatttcttctggcttatatcatttctactgagaagtcagctgtaatcttatttctgctccttcaaagatactgtgtattttttccttttgcttcttttatgatttattttacttctgtattttttaaaaatcagtttttctatgatatgccttaatggtttaaaaagtgtttattatgcttttagtttgctgatttttttgaatttatggattgatacttttcttcaatttggaaattttttttgccattatctcttcaaatatagtttctttccaattattttctctctttctgatatacaagttacatatatgtgatgcaatttctctttctctctattcttgcctcctccctttctttttctttctgtgtttccacttgggtcttttctattgactgtctttgagttcattaatcttgtcctcaactctgtccagcttggtactgtatgtatccatttagttcttattttaagacataacactttttatttctagaaatcccatctcattattttgtatagattctatggtggctttatattatgccaactaggttaggctgatctacatttctcacagttctttttcttccatgtttccaattgaagtgggtcatgaaagacatttcatgtgaaattcggaaggtggaattaaagcggtgatcagattaatttacacctggaaagtcatgaacagactcaaatgctgttgcagctcacacatgctgtcattgatctgttggttcacatcattggtgttgagcagcagacaggccttcagctactcctctttcagcttctcggaatcgttagccaaaggtgtgccaactgtatgacaaaggcttttaacttcttgtgcgcaaccattcccactgatggtagaagtagtgagaaactggaaggagcctaggtccatccccatgtgttccagtttattcctgtggattccagtttattctcactgacccaaccttgatatctgttctttttcctcaaatgtttaaccttgagacatgaacctccagtatcagatacaaaggcgtcaaccttaatgtgacttctaaccaactagatagaacatgactggttcagattttaattatctgataaaattctccaacattttatctttttgctgtataatttatctatttttcttattcatgttattcattttttttataatgtttgtcttaatatctacatcatgtgtggatttgtttctgttgcctatttctttttctcttgggttttggacccatggccctgtctcttgccatgcccaaaaggattttaataaatgcagaacactgagaataaagactacagaggctccagatgttgtgatcttgcattagaaaagggttaccctttcttctgccaggcagatagagaggctatcaccttaatttatccaggaataggctgactttagacatgctagaagttttgattaagattcagtctatctttggtttcctttgtctgtagtctggagatctctgtggcttgcaattaagacactacttcattcactagctcattcatcctagcaagtttttgtattctcagcactgggagagtacaaaatgtcccactccaccactcagggtttgtagcttagctctttagctccaccctgcacaccttcaatatttggcaaatattttgaggggaaaatcagttgtgtcttgagcctcttcaattctccaattttttgactccaatccttgtaaatgccaaaatgtctaatggtttctgtgtccccaacggtgcccccttgccatttgaaagcctactttcccagtctacccatgtcaagaatcagcacaatcttccagaaaaaaatgcagctgaagatcattattacacctgtccaatagccttcctttccaatgattttagcctctctaatacttattatctacaactatctattgcatacctttaaacagatgatttttgtgtttgttttgttttaaaaaaatcaacaggtaaatcaatctacttaaaactaatcttcatgcaacaaaaagcctgccaatctgttcttatttatatcaaactgaaatttctattagtttactgctctgctcttaggataaccagttccctagtcttaccatggcttttacaatcatattataatgtcttgtcagtagtaatttgagagggaagataggtgaacatgtcccttcaataagccatcttgaactagaacccccagggcattttgaaccttctgcctgtattacagttatctgattatatttgtctctactgctatgttatacatttcttaaaggtaaagactatatatgttatagttatctgattatatctgtctctactactatgatatacatttcttaaaggtaaagactttatgttattcatattcatgcttaccataatacttagcatatgtaatcatatatagtaggtattcatcatttatttattaaagaacttgtgaatagataactgcatgaagttcagagtcagtggctttcttggtatctttcacatgatgaatagtattgcttttaacaatccaaatattgtgtataatattatagaaatagaggcaaatatttcagttttttttttttttttacagaacgtggtatattctatgcccctaacaaaactcaagcaatattaaaaacaatttgcatctagcttctgggatttttgagagaattctttaaaaatgaaggactttaatcatctggtccctctagattttatagtagttgaagaaatatataaaaaaattttgtgatatatattttggttatctcctaacatttatatttccctttagaaaagaaaaaaatcccacatgaaaagggaaattgaagagaaatattacctaccacataaaaagtcatacttttgtaagattatatttccatttctacataatattctctcattatgaaatcatcagtgcattttttagtcataaacaagacagtgaaaagaaaatgagtaacaatataaatgactttctggaaaatgaggtctattcaaatttcaggaaaaaagttaactctgaagtattaattgatcataatgaggaggccaaacttcagatacacagaggagccatggaacatttcccataggcctgcagcttgtgaagacgtctaggaacactgacatgaagttaaatttaaaagtaaataaaaatagataagactatcagactgtcaacttgaagaacttcaacaaggaatgctatgctctggctttttgcaattcaaatatacagtaggaagaaacataatcccactaaaaaatacaattgccgtcattcttggccactagaaagaaatttcaaaaaggtcagcctctgctcctttcttccctaagaagtgaatcgatgatatagattatctcatgagcccatgaacagatgcccagttgttttggcagaatttcaaccctcgggagagaatcttaatctagtatctttctcactactggtacaagaggcaccaccactttctacaaacttcccaaccctgtttaatcttcacattctggtcttctcctttgacattccacctgaatattacatttttcattaaacaactatatatatgtgtgtgtatatgtatatatatatgtgtatatatgtgtatgtgtgtttgtgtgtgtgtgtgtgtgtgtatatatatatatatatatatatatatatatatatatgaccgttttgcagggactaagacaactcattcagtacagctcctccaaacaccaaatttttattaccaaatgcttcagatggacacctctttaatatgtacctgtcttaaaaatggaagcagactctcaagttccaaacttaagagcaaataccaaaaacaatgacaaactcagtggctgtgcaatacactgaccattcagaaagagaggcttgatctttcttcatcttacattgtcttctgaattcactaccattagattttggaagagcataaatttagaagaatgaagactcaccttccctacttcctttgcctatctctccaggacgacgatagaattttcccttctctctgacacttatcctgactatataatatgcaacactcccagatcttctcaatggactagtgaccacatcacttccattcctagcaccatttatcaaacagtgacctatggaatcaaagtttagcaaaattttttagaacctggcttaagaaaaccaaatcccttgtggttacaacttcaagttgtttcatgcccagagaatgagctacagtcctttccagatattcatgcctgaagctcattaataattttcttctctcagtaagtgaagacgaatcctttaatttgaagtggccttcacactaatgagtcatgtcataactctggaatcctttaagttgattttttatcttgttgactcagtgaggtagaaattaaggacagctcccattagctttatgtatttcttgaagcatctgctcatgatggcaaactgatccatcctaaatatttatttgcctataaatgccatggagtcaacacttcactttcagctactttctttctttcttttctaacccaaacataaaatttctttaaaagttctgtcaataacatcacttgcaatttaaacgctttaaaaatatgatcctttttgctgtgtttttgaatacttccttcatatttaattgctgtagacactttagttcctaattaaactgtattgtttatgatgttcggtctttaatagacatgataacaaaaaaagccagttgtagaaaattctctgattgttaattccagtcttaatcttaatactttccatagccagtgaactcatggggttgagaggagaatgggtagaaaatgagatacaaagcaaatacatagttcatgtttttgaggatttactagatgttctggaagacaagcttgaattagacttgaattgaattgaactctatgatttgtaggggagattagcttagaaatagtatctcaaccacttgcaagataaatatcctcctttgtcaagtctcttttcagcacatccccaggtttcgcgttggtgacagagaggagcatatattgcacacagaaagcttgcttcatcctcagagccctaaaatacttttattgtgagagaatggagacacttgatgaatctgatgggttctggtcatggaaagatttgctatgaaccattgcatcaaggttgaaatgcccaagaggctgacaagcttattgtccatttcaaagattaaatagttttggaaaaattttctcccctggcagttgtaattgtgtccatgaaataagtgttcattctgcttgagccctgtggtttgaatgcttccttctatatttccctccagtggattgattcaaaaaaagatttacttttttagacaatgcaaattaaccctgtgaacctgataacacctcccccaagtcctaacatccttgctgtgtcccatgctaataggcaatcagagacactgtcaagtctctttatcatggattatctttgtatctgtttgaagggagggaaaggaactgagaaatcattcttctaggttaataatgtggttctaggaaatggacaaaagctgccattaataaccttgagagccttgtgctgccagaatagcactcatgagttggtaaagtggccatttagttgtgggacttccaagacacctgaaaaggccttgattgtcccacataaactatagggaggataacgtctccaaaagaagaaagagggtatcagcagaaaaataaaatacaggctcatcataaagcaatcaactgttccctgactttgcccagggtcaacattacatattagtatgctacgtgctgacaaatatttgaccttttgagtgacttacagcatttctgtttctaacctggttaggtaaagatcattatgtgttaacacagaccacaacatattcctacttcacaggtaattatatctagaattcttaagtttatcattttacaatagcctcaatatcatgccttaaaattgaatgtgagaatatcaaagaagcctggggacagttaatggtatttacttctgagcattcactatgtccctggcactgggctaagcctgtgagtaattattttgtgtaatcctgtaacaattctatgaggtaggctctggggctatcctgtagaaactgacactgacactcagagagattgagacgcttgcctaaggtcacacagttagtaattcactgcatcagtttgaacccaggtcttcttcgggatcctggaattggagctcattcataactattgtcctgtactaccttcctgtactatctcaatcctcagtgtcctgagatagaaggataagctaatgctagaaagaagattctttactaaccagacgcatacatagtatgtcgactcttgttggatatgatttttgtgtcattctattattaataagaatagcttctaactgtttttgaaaatgtcgtttgtggctcgaaagcatcttaggatagtgtttgttgcccttgttcaggtactgttctctctccacatttttgggtcttcagaatgatcagcatccatgcctgaagtgaggcaatggtggtccacatatacgagtgagaaaacaacgagcaagaatatctttgttcaggtggctggcaaaatcagctcaccatagttctctagaaactatgagccaaataacaaggcaacattaaggaagctattaatatattgaacatgactgaagccatactagatattagcatcaagcagattcttttctgtgaaaagtagaaatagcagtgggaaacaggacttggaatataagtatgccaatatcatgaacactgacaactagaagcactttttaattaatggaaatgaccattgctgatatcccaagtgatctgtgtgcaggcatcacctgttgaagatgaagatgaaggctgattggtgttttcttacatttccaccagtcagaagtgaataataattgttatatgaatattgtatgctgaaattcatgtgttgaagacaaacctccgcagagccagaggattttctttcaccttcactgcccacaagtctctgtcattcttggctgcacgtgtttccttgcttgatttatctaattattttcttccttctttagtcgaccaagtatttagataccagatggtagggagatcagaagcaggaaccttttctgtctcacatggatgttgtagggattaatgaactaacatattctaaaatgattttaaaaggtgaagtgctatataagtgtcaagcatgattaactagcagccaagttattaggcacctgaatattatgcatcttttctgaatttcagaaaaatggatgtacatattaattttcaacagcactgttatttgaatgatattcatacactcaaataaaagtttagcccaatcccaattatctctacttttctcataccagtcatgtaggccttaaggatggaatatgtatgcaactttgagtaatacagacacaattaccaatcttgtggcgtttttagtgcctcaaggaaaagatacacagtaaaatgcaaaatattacaggaagattgagggacagcaatgagtatgaactgtagctcagaccctctggttccaaactctggtttaaccactagttctgtgactttgggcaaattgttttacctctctttgcattagttatttatgcaaacattggggtggatgatagtacctacttcatagctcatacatataaaatgctcacaaaagcagttcctcacatgcagtgattgctccttaaatattaactattatcattataattgtcactaacactggccttggctggtttcaccctctgagagcgttaataaataagatgtgtagttacttggctaggattcatgtataacttttagtagtttacaaagcccagttacttataatcctaacctatgattattcaacacttgcttgtgccagaatccacaaacctcggtgaaataggttagcaaaatggtagcttttatttttgccttatttgctcagcaaggtttttatttccgttcttctggtaatacactctaaccactaccttttatcccaggtacaggggcggacaaaacttcatacctgattaatcgtagtacttcttaacctaaggcaaacatgtaaaccagcagggctgacctgaggccccctctgacatactaagtaaggatttgatttgaaataaataaaaatagccttgcctaggggttcattatacttgaaaaatgtgagattggggttaaaactgaccacgttcattgccacatgaagaaagtccagctatagtaaaaaagaatgaagccgaacagagctgagctgagctgagagatggaaaagggagagagttctcttagctttgagttttgatcctagcaattgagaccttgatccctatcctttgatttggtcagatagcacagtatcccttccagccatgtgagccaataaatgttttctttttgtttactttaaaatagtttgaactgggtttctgtctcttgaaacttaaaggatccttacaaaacaaatgctataattcacccatttcgtggataagggaattgaggcttagagagattaagtgacttgctcatggtaacataaccagtgatttttcagagccagaacttcataccctatttaatgactccaaatgctatattctagtcaagacaacaaggccagggagctgggagatggagctggtcattaatgaaaggggcagagaagttatagggcaccatcaaattgtggctatcctcgtagctaattcatgcactggttcatcacatatttgttctaaatatgtgatgcacaaagaaaagaaaatctaaggccagttgtttagatagagaaagtgagtgatctgcaggtaccctcaaccctcaagggtggctgtctgctgtcagctgctgttacccagcaaggggtgagaagccacagagccagcctactcgtgtctccaagttgctattccagtgaatgcaatgtatgcagaacatgtcaaactcttgggccgctcagaaaattgattatggagcttgccccttccttaaaaagcaggcttttgtttttattagcatgtgtaaatatggaataacttctaaatgcaaatatggatgacatttgatttttctgacatgtttggaagcagcctggggcaaggtggcagtgaatcagtaaacatcacgggaactacactgggaatgtatcaactgtgcatactattaatgggtttatgccatatgttccataataacatgtttgctaacatgggattggactgcctggttgtatgacaaagctgccacgtcagttttctgatgtatagaaactgagtctgttagccagatatagaaatctagcaaggtcattttaggagtaatttccattttgtgtgcttttttccccctcattgactgtaagagaatgtgatttgcctcattacaatacaattccaggtacaaaatacaataatgacctttatgccaaagactgaagttcatgtaattgataaaatagactcagttctgcagtgttggaaaccattagctggaggcaggaaccgtgttaacttcatgacgtgggaggtcaaaggtcaaggtaaaggcccaggctgcaccacttctggactcagaaagaggaaaacagggctgcccagcaacattggagtttgcggcgctccctaggtgtgtcagagacatcctggggcatgtggaaagtgaaggaaaggcctgttattaaggtgagggtcaaaaagaaactagccaaacacagctgcacagtaacagactggaacaatgggccttatgaagcagggatactgggatagctgtcgctccatttgtcttctctttactgacttcatctgcttcatatctgaccccaaattatactgcccatttggaggcattgcttctttttcctctcctggattcttgattgttggtgctctggtgagaaaccagaaatgtcttatgaaatctttatagctacgtaggaaacttgagcctgccattttcacccacccagggaaggtatttgcctcccgaaaccgtagggtggcctgacatctgctttttattgaaagtagccaaacaaatcacgtccaccatgtggtgattatgacaagtgtattgattgacattttatgaaacatgcatttacaaatggcatctgaataccgaatgccactacggaccttaggactcttcctcaggcagcttggtcggagtgagatattgccagcattcattctccccttcactctgattccactctgattgagagtgcattgtttaatatcccctacgaacgacaacaacccaaacgtaacatagaaatcgggagtgaaaagggactgtgaagagtcacatactatatgaaacttgcagcttataaagagagaattaagaaagaaccagaaatgtatatatttggtcagaaggaaagagaagtgtgaacttaagggtattaagcagaggaaactgcctaaaatgataaataaaatggttagttcagttgtttctttacatccctggagttataagtatctccatctgaccatgagttaatggtattgggtatatttactgttgtatgattttcagagcttctagcccaaaactggagacaaaagctctatgttctaccaatgctcacagatgaataatgctttttttaaaaatatcaccaattctgctgtcatttcagacctcagagactctgcttattaggataggaggcaagcaaagaaatgaggtgggcatagaggtggcaggggttaatttcatatttatcatgagatcttgcatgatttccctaaaagatatttaatttccactgggcataataacttgcagctgccagaatgtgctgtgtaccagtggcgagttcttgtctttggagacttatgcaagtcattatttaaaaatagagatccgggagttacagctggctaattaatctaccactaaggaaagctaagcgagtgacccacttaactgctttcaggaaccatggctactctgaagcaaacttttgaaaaagtcctgtacaaagaaccaaactgatacatcctcatggcactgtcgtggtcttctcagggaacatgttccttctccatctgctcctcattcccacaaacaaacaccactaattcagacccttatccatacacatgtgaacgtccacagtgtgggttcccagatactttgccttttgggtccttctttctgaggttgctgccagtctcttattcttctctttttcctacatcacccgcctgctcaggaaccccgcttcagtccatgttccctattacttccactctgaggcttctgcctgtcttctgaggattcccctaagagactcacaccacatagttacccatatttcttccattccctccactgcacctttccctccaggcagaacaggtctctgccctctcatcctgtccccttacccagaccacctttcccattcctctctcagcctgaatatggtccgtacatcctgcaaagctctactgtatctatcccaggatatttttccttggacttgatagcagatggttgacataatcaaatcatgacacattttcatcattggtctgtgaggaccctaaccttattcttcagtaagtctattgatatatttattatttttcttcctactcctttccccctccctgcagaggcaggcattctattatattttatatacaccttttttattgcacacacccttgtcaaaaaattattgtcatacgtatatgtattttaatttccataaatgacatgtgttaaatttcatctgttttttactttatttacccagtcctatatcttttttcttttttttgagacagagtctcactctgttgcccaggctggagtgcagtgccgtgatcttgactcactgcaacctccacctcctgggttcgagtgatcctcctgcctcagcctcctgagtagctgggactacaggcacccaccaccactgccggctaatttttgtatttttagtagagacagggttttaccatgttggccagactggtctcaaactcctgacttcaagtgatccacccgcctcaacctcccaaagtgctgggataacaggcttgaaccaccatgcctggcccagtcctatacctttaaagtccatccatgtctctaatactccatggtaggcaaccaccacctttaactcttcgctgtcttcataatgtacacatcgagatccctctcaccccctgtaactccccttctctaaaatcccctggccttcatttactataaactagactcttaattatatgctgttttgtattttcctaggaagggtttatgtttctcccttgtctctcatgtaattcctttgagatcagagaccacctcctatactctttcctttcctactccacccaacactacttctgtagatgttctttggagctctgtgcataattgatattcaataaatcattgtttattcagtgaactgaatagtgtaactccatgaaggtaggtatttttctttgttcataaccatatctccagtgtctaaattgtacatggcatgtcataggtgatcaggtaataggcttgaagaaaatgattgtctcacctttcacataagaaagggttatggaataatagattatacaggggtcaggatacctatgttctagtttctagtttgctgccaactagattgtgtgacactgagcacatcaggtatcttctctggatcttggtttgactgaattatttctcatatccttttccaatctaacttgctaagactgattttattaacaatttttcaacatgaaataaaataatcttcaatgtaaaatcatctctagagatagaataatcatactcaaggcagtagggcatgggatacacagggttagggaaagagatgagaaaacatcctatggttccaatctttcgctttcagaatgattggtacaacaaaatgaactactacctgtaaagagcttagaaaagttcctggcacacaataagtcctaaatagtgtctactattatttttataaacttaagaaattctactagcctttatgataatattttacctggcatttggaagttatcacagttataaaccaaacaataccaggaattctagtatcactactgaaattaataggtttctttgatgggacagtaatcacaagacacattctgatttctttaagtataaatatttttttccccaggtaatggacaagttctaattctcatggtttttataaggtgaagtaaaggaatattgtccttcaagatcagttagcagccaagaatgatatttgggccagaatcctgagttctatatttgcaatctattttaaaaaatgactatttctactatagagcagtcacttaaaaatggaaacagaatagagctgtgaatttattaatatcatatgaggatgctatttttccctttggtaaggaagtagtaactaaataacctaatctagtttctcttatcctcagggaagtgaatccaaatattggataaaccattattaaaattctaaacagcatttaaagcatgagcttgtttgttgctataaggctattttttttttctctaggtcgagaggtaaagttatttgtcttaaagaaaaaatcattaaatggtattggtaatgggctgcaggttttataacttaactatatttgcttcacgagcaaaaatagcatttgatggctattttattctactcttcttgggcaaaagaaatcttaatcaaacatcatttcagtttaatgcttttacatgcaaaattcaatttgtgaatttatctgctatctaaatgttaagataaaataagatagaaatacaaaataaggactggagactccatataagctagaaatttttggacaaaggaaggattacaacttctactcaaagggtttgagaaacaggtagataaaatatctagttaccaataacgacctaggaaaatgatcacaattcagttgttttagagctcacaaacactggagtaaattataatacttacatgatgtcttagtctgttctcacactgctatgaagaaatacctgaggctgggtaatttataaaggaaagagatttaattgactcacagttcagcatggctggggaggcctcaagaaacttacaatcatggtggaaggggaagcaaacatatccttcacatggtgtcaagaaggagaagtgcaaagcaaaagctccatataaaaccatcagatctcatgagaactcactcaacatcatgagaacagcatgttggaaacctcccccatgattcaatcatctccacattgtcactcccccaacatgtggtgaccacagttcgtattacaattcaagatgagatttgggtggggacacagagccagaccatatcacatggtgaaatggaaagcaaaaaaaaaaaaaaaaaaaaaagcaggggttgtaatcctagtctctgacaaaactgactttaaaccaacaaagatcaaaaaagacaaagaagagcattacataaaagggaacaattcaacaagaagagctaactattctaaatatatatgcacccaatagaggagcatccagattcataaaacaagttcttggagacctacaaagagacttagactcccacacactaaatagtgggagacttttacaccccactgtcaatattagacagatcaacgagtcagaaaattaacaaggatattcaggactcgaactcagctctggatcaagtggacccaataggtatctacagaactctccacgccaaattaacagactatacgttcttctcagtgccacatggcacttattctaaaatcaaccacataattggaagtaaaacactctgcaacaaatgcaaaaaaactgaaattgtaacaaacagtctctcagaccacagtgcaatcaaattagaactcaagaataagaaactcactcaaaaccacaaaattacatggaaatttgaatgactcctgattaaataaggaaattaagacagagataaataatttctttaaaaccaataaaaacaaagagacaatgtaccagaatctctgcgacatagctaaagcagtgttaagcgggaaatttatagtactaaatgcccatatcagaaagctaaaaagatctcaaattgacaccctaccatcacaattaaaagagctagagaggcaagagcaaactaaccctagcagaaaacaagaagtaactaagatcagagcagaattgaatgagatagagacatgaaaaaccctccaaaaatcaatgaatccaggagctgcttttttgaaaaaatgaacaaaatagaccattagataaactaataaagaggaaaagagagaagaatcaaataaataatgatacaatattgtgtaccatcattttacatttccatataaaagcgttaaacacaataagaaatgataaagaggatgtcaccactgatcccacagaaatgcaaactaccatcagaggatactataaatacctctgtgcaaattaactagaaaatacagtagaaaaggctaaattcctagacacatacaccctcccaagactaaaccaggaggaagtcaaatctctgaatagaccaattacaagttctgaaattggggcagtaattaatagcctaccaaccaaaaaaaagaccatgaccagatggattcacagccgaattctaccagaagtacaaagaggagctggtaccattccttctgaaactatcttaaacaattgaaaaggagggactcctccctaattcattttatgaagccagcatcatcctgataccaagacagggaagaagcacaacaaaaagagaaaatttcaggccaatatccgtgatgaacatcgacacaaaaatcctcaataaaatactggcaaaccgagtccagcagtacatcagaaaatttatctgctatgatcaagtcagcttcatccctgggatgcaagtctggttcaatgtacacaaatcgataaacgtaatccatcacataaacagaaccaaagacaaaaaccacattattatctcaatagatggagaaaaggtatttgataaaattcaacatgacttcatgttaaaaactctcaataaactaggtattgatggaacatatctcaaaataataagagctattcatgacaaacccacagccaatatcatattgaatgggcaaaaactggaagcattccttttgcaaaccagtacaagacaaggatgccctctctcaccactcctattcaacatagtactggaagttctggccagggcaatcaggcaacagaaggaaataaatcatattcaaataggaagagaggaaatcaaattatctctgtttgcagatgacatgattttatatttagaaaaccccatcatatcagccccaaaactctttaaactgataagcaatttcagcagtctgaggatacagaatcaatgtgcaaaaatcacatgcattccttacaccaacagtagacaaccagagtgccaaatcatgaatgaactcccattcacaatcactacaaagagagtacaatacctaggaatatagctaacacggtatgtgaaggacctcatcaaggagaactacaaaacactgctcaaggaaataagagaggacacaaacaaatggaaaaacattccctcctcatgggtaggaagaatcggtatcacaaaaaggccatactgcccaaagtaatttatagattcaatgctattcccattaaattaccattgatgttcttcatcgaatgagaaaatactactttaaatttcatgtggaatcaaagaagaccctacatagccaagacaatttcaagcaaaaagaacaaagctggaggcatcatgctacctgacctcaaactatactacaaggctaccataaccaaaacagcatggtactagaccaaaacagacatatagaccaagggaacagaacagagacctcagaaataacaccacacatctacaaccatctgatctttgacaaacctgacaaaaacaagcaatggggaaatgatctcctattcaataaatggtgctgggaaaactggctagccatatgcagaaaactgaaactggactccttcgttacactttattcaaaaattaactcaagatggattaaagacttaaatgtaaaaccccaaaccataaaaaccttagaagaaaacctaggcaataccattcaggacataggcatgggcaaagacttcatgataaaaatgccaaaagcaatggtaacaaaagccaaaattgacaaatgggatctaattaaactaaagagcttctgcacagcaaaagaaactattgtcagcgtgaacaggcaacctgcaccatgggagaaaatttttgcagtctacccatctgacaaaggtctaatatccagaatttactaggaacttaaatttgcaagaaaaaaaaaccccatcgaaaagtgggcaaaggatatgaacagacacttctcaaaagaagacatttatgcagccaacaaacaggaaaaaaatctccacatcaatgatcatcagagaaatgcaaatcaaaaccacaatgagataccatctcacatctgtcagaatggtgattattaaaaagtcaagaaacaatagatgttggtgaggctgaggagaaataagaatgcttttacactgttggtgggaatgcaaattagttcaaccactgtggaagacagtatggtgattcctcaaggatctagaaccagaaataccatttgacctaacaatcccattactgcgtatgtatccaaaggaatataaattattctgctgtaaagatgcatgcacatatatgtttactgcagcactatttataatagcaaagacatggaaccaacccaaatgtccatcagtgatagactggatagaaaaaatgtggtacatatacactatggaatactatgcagccataaaaaatactgagatcatttcctttgcagggacatggatgaagctggaagccttcatctccagcaaactaacacaggaacagaaaaccaaacaccacacgttctcactcataagtgggagttgaacaatgagaacatatggacacaaagaggggaacaacacacactagggcctgttggggagtggggggtgaggtgagggaacttagaggacggatcaatagggtcagcaaaccatcatgacacactatacctatgtaacaaggctgcatcttctgcacatgtatcccatttttattaaaagaaataaaaacaagcattaaaaatggaaatttgtttttaatcataaatttaattttggggagtaccatagtcttctattaagataaaaatgggctatattctaataatgttattctgtgttgtggggctatattatcacaatagttcttagctgaagctgccgttttttcttatatggtataaattgtgataaaataagcattttgaacacccatggagtgttgccattaattaaagaagataatatttagaaaggcaatttgaaaaatctcaagtcctatacacatttgcttctgttattattttattcaatacaaatcacaaaagtgcctattgtgtaccagaaactgctttaggcacttgaacatttatggagaaataataacactgacctttgcctttaaggatttcataatgttggggaaaccaatatgtaaacagagaatgccaatgtaatgtggtaagtgtgatgatagatacatgccaaggtgcttgggagcatagaaagggacccctaagtaagtttttagagtcagagagttcagaggaggttagagaaaatacaggaagggagtttcagaggaggaggtggcaagaatgtagccttcaggtgaaaaatagcatagtatattctgagcagtaaagagatcagcattcctagagcttaaaatattgagcagagaaagcagaagatgagtctctagaagtcggattacagaaggtctgtctattatgttaaaggttcagatttatctgcttggtgatgaaaagtaaggaaacaatggggtccctccgggggagtatggaacgtggatccaagggtcagagagaacagtgaagagggtattgctgaagtctaggggaaagagccttcagttattcatgtttccatgctgtttcttagaggctcagcccaagtatctgatctttcccgcatctatgcataagttttctcaagcagtgctggtgatctccacaccgcatcttcctcctaaaatatttactgattatctgcattcaagtatgttataaactattttaatttgagatataaatattagtcatgcagctaactgcacccacctttccaggagcatctgctttttgtgacagacactgtggctttcaagggccttgccttattacttattacttattgcaccccactattcaacctgtcttcctactgcactaatatgcaccctgtgctgcagtcatgcagaagtcttcactgttctagaaaatgaagcacatgctgtgtgtatcacatggctggagtaatcatttggacagtgaagattttctgaggtgtccccatcatctcgtcacacctgttgcagaatgccacaggcagctctgtgaggcacgtgctgctgcttctgaaatgatgcattcccactcaattacctcattcattacaagttttcagctacagattaggagtactattcaccccttctgtcttagcagaatgttaggaacatttgaatcagtggtactttttaaaaaaaattagattttactgctgtttgctgtttactattacaatcacagaagtaaaggctaagccattttcttctttaaaaaatagtgttttccaatatgttcaaacaatctccaaatgaatagaagaaaaaaatgcccacagaagtttcttagactcactgtcatatctggatactttaatctcagatgttctggctcttcccaggctgataggatggctgggctaataatacaaataccttaagggctctgttctctactgagtctggacctagaatgtgcagctttaggattaggggtactagttttagagtcaaactgattcccttcctgattaccacttacaaactgtgagatgtctttagggtggttggagggattaaatgtgatcatctgcactgctagtatatagtaagggctcaaaaaatgaagcctgctatggaattatgactattaataattcatgctctaatttaagaaattgcctggtttaactagcctcaggcagaggctgggactgctttctcatcaggcctcagctacatggctacaatatagagaggttccttttcagatatgcacacacacttgcttctctcatcactgatgatgcttgctctctctagtcaattaatatgatccacctctcagggtaatcatttccctaaggaccaaatgtgcttacattcagttgcacccattgtaatgcaattaatttttccaataatatccatctaatagataggtacattataaaggagagccataataataagctacctcctgtttgctcattttgaagagactcattacggacaatggtcctcaatgttaatgaagtgacacaatccaattagaagattgcagttacacatggtagtggtagaatgagaggaattgctacctaacaggtaatgtcactgtttgtgccttgtttttgccctctgtggggttgtttctgctttggtccagatctcactctgtccttgggcctactttgggattctgccatcttctgaatgctggtaaatgcctaagctgtaaacagcttgcttttctgcagaacagctcatgcctgaaaaagttgataatgatttcaaaatttcttttaattgagtttttaattacaacacagatagcaaatagccctatcacatgtaattttgacaaagataacaagcaatttcatattctttggagaatgacagtgtgggagcctacagttaagtaccgactgccttgtttttagacaggaatatctgacaaccactcactcagggaaggtcgggaactggaacatctggatctcaataaattgttcaatataacaatccaagtgctataacacaagctgctactgggaatgtaaatctgactggctggtttaggatcttgtctttctaattaatagaccacgtattatgaattgggatactgtagagccagttggtgtatgggcatgccttcaccttaaataaatatttttatcttcagatcttatcacatcagaaaaaaatatgcagataaattattccaaaatgcaaagcttaaatttgatatgggtgccgtgtttcttcattacttttcttttattggcatttacttaagagttctagagccatgcccagagttccagaactccagagctaaaattagacaaagaaacttctccatctcagagagcagagaactcgcccacattagctgatctactggcacctcccacagactcacaaaggccatttgcataactcccatgcctcctagtaacatccaaaggctcaagccgatgtatctttttcaaccacagagcagtaattatcagacttttgcatttcaaaaacctggaaaacaaaaattcttcttaattcaagtcctacagagtggtcaacttcttattttgctaagtaaagatcattaatttttttccttttcactcatttgttaattcagtgaatatttattgagcacatactatctgcagctactaaagtatgtctgggaatgcgatgaaaatcaaagctagatatagcccatgacctcaagcatcatatagtctagtgggggagatagtcatcattaattaattacatttatatatatatatatatatatgaaatttaaattgagctacgtactctacaggaaatagacatggttctctgcaagcatgtaatatcatatattaattttatatggaaagagagtatcagggaaatattccccttaaaattaatgcttccactgaacaaatctcagactatgcaggccatggtaaggattttgagcttcatgttaagagtaataaaaagtaactaaggaattttaagcaggattgatgtttttaaagaattcctctggatgctattggggaatggattggaagaaaagcaagagtggaaggagtgagatcaattgaaatgacatttcagtggcctagatatgacctgtgtgatggccatggtgcaagtaactagttggatttaaaacatatcttgaaactagaatttttgagactctgacaaatgaagagagaagagagaaagagagaagtatcaaggatgattctcatattcctggcaagagcaacttgccatttaatacaccatttactgagctctaaagaccaagaaaggagcaggttaggggaggaagggggaatcagaggttccttttggggcttgttaaatttaaggtgcctatgaaatatccaaggcaggaagatacaggtgtcagaagattagaggaggattctgacgctagatatacatttaggagttatcagcgtatcgatggtatttaaagctatgggagtcaataacatttcacaggaataagcatgatggaagttataatatttttgaggcctgatacagaaggagaaatcttcagagcatctttccatgaaagggatcacattttaacacccacaaagtagaaagaacataatatcaattctttaatttaaggacatttagctgcatgaaatcctctctccattgtccttatctttctcattttgctgcagatcagtgagaactttgttataaaacagcagtggcaaaccactaccgtagcgtttctgcaactgccttaggcaggaattacctcattttggtagcagaaagtcttgtccacatccagcctcgcctcacctcttagattttccaagcttaaaacacatctggagattctgaatcaatttaggacggactaaaagtcacaaagtagcacagatcctacattatgacatccgttctgtcctatcctacattgcaaaatctgtgtctatgcattttgtagcattcctaagtcaggggactacattgcaaattgtaatattgttagtcatatatagggtcaaaaacacacttgcataaatatcgcctcttcctgccaatcacagtactgtcattcgtcgtagtattctttcctactgaacctaatataagtttccagatcctcctgttacagtgtccaagacagtcctaatcaaccaggttgaatatgggaggtaatagtaataataaaaataattatattatacttatagctgttataattaataacattttttgtactttgtctcatgcactgcactaagtgttgtctatgcctcaccttatgtaaacattaactgcaacttagaagattgctaagagatgaagaaacttttttttttttttttgagacggagtttcactcttgttgcccaggctggagtgcaatggcgcactctcagctcaccacagcctccgcctctcaggttcaagtgattctcctgcctcagcctcccgagtagctgggattacaggcatgcccccccacatccagctaatttttttgtatttttagtagagacagggtttctccatgttggtcaggctggtcgcaaactcctgacctcaggtgatccacccgcctcagccttccaaagtgctgggatcactggcgtgagccaccgcacttggcagaagaaacgttttacagatgaaaaaactgaggttgaacaatgagcatcccaggtgtacatttcattattgtttctacattgtgttgtaattatatgaaaagtacagattgagactctgtactttccaatttggaatcttaacacctaacagtgcttggcacatttaaggcacgtattaaatgttgaattatggaaggccttacatacgctatagtgatagaagcttttcaaatggaagtggttatgtcctgcgtgatttggaccctcttacagcacctagcataatactcaataagtatttggaaggttgagtatatggatttaaaattggctggaaaaattccagtaaactcagaggttttggagtgatggtgctagtagtgggatcactactgaagaaggataaagaagatgaacctcctaatatgctcttgccacaactgtgggtctgactcttatttaagcattcttattcatgacctggatggaaaaaaaaggaagaagctgctcctttttagaattcactaatgattctaatttggaaagtatcttgagcagctcgggcaacagaaataaaatgcaaatgacctttgagacatgaggtatgtaggctgggaataataactttgtgagcatttgaaaaaggcaaggcagtgaatacacctggggaaagagaatccaaacacagagctgttctgggaagcagatgccagatctcagtgatgccaaagtaggcccaggaggcacagtggttggcaaattaaattcaggccagccatgcagtctggcaggatgaaagagaagtccaggttgaggctgcctgtgcagaagggcacggaataacagttcctctgtggacagttgtagctgagcagcacctggcaccacacgttgtgttcccaccacttcattactagggaagctcaggcaatttggaagtgcagagaatagcaataagagtgaatgaattcaagagcccgaggaaggatgcggatgaaagattaaaaggattggatagctgtagtttagctacagaaagctaagggaagagaaaggagaggcctggaaactaataataaatatccaagtctgttctaaaatagccaagaagaaacttgcagagtaaccattaaattaagatttttcaattgaaaatggacattttcttccaagccataggcttcttgcctaaaccagcactctgcctacgcaggtgcttagtaaatactatcttatggaataacttttgtttgccaaaagagtatatgatctgggaactagaccaaccgaaaacacattaaaaaatcagacaacccattccttagcgccccgtgaggacaggattaaaggaactggatttttgttgtgttgttcaagtcatactcttcaacaatgaagttacctcttcccattcagacaaataaagaacaaaatagaaacctttgtagcacagggaatgcctaagacacggttgactaggctctggttaaatcccagtattgcaatttactttatgtcaaagggaacaagcaaaatgctaatgcctaccctctcagacaaaccttcctaggcaatggagggggtgtagaaaagggtgtactttctggactaatggtgtacttggtggacttcacttttaaatgatcaaccacttgggaggcggaggggagtggatcacaaggtcaggaatttgagaccagcctggccaacatagtgaaaccccatctctactaaaaatacaaaaaagtagctgggtgcggtggcaggtgcctgtactctcagctacttgggaggctgaggcaggagaatcacttgaacctgggaggaggcagaggttgcagtgagccaggatcgcgccactgcactgcactccagccccagcgacaatgcgagattctgtctcaaaaaaaaaaaaaaaaaaatcaaccacaaatatccaagtagataagttagaggtaatttcttgttttatagaaggagtctctataaacagccagctccccttgctttgagccattctttgtttacagatcattaaccacacctttcttaacttagtgcctgggtaagaaaataaagtattcagcttcccagccaattgcaaagccttcatagtgccattgttaagctccaggctcagagggcttcctcaaacaagccagacctttgaaacatactgctcctccctctgctggtcttgtttatcctcccacttctctgccccattcttgctttcttcctggctggctccctctcattcttttcctctcaacttaaatgtcccctcttctaaaaggccaccctatgtgtgtttatctgcttgggatgattttggctgcaaataagaggaaactgtatcgatagtggcccaggccagtagatattaattcacttgcttgaagtccataagcacatagttcagctctggtaccatggctcagcaatgcagtcaaggaccaggcagccttctagctctctgcttcatctcataccattggcttccatctttattatttcaatatatatgcttcaccccagcatcacttccatgccccaggcaggatgacatagcaggagttaagggagcataaagtctttcttacgtgaggcgttgttgcttttttcaggaaggagaatagtccccagagactcctaactatctctgattgattagaactgtgtcacgtgcaagatagtctgaaatatcatgattagctttccaacctctatagtaaaggaaggcaagggccaggggtctgtggatatcttttaggcagccaaacttcagtgtctgccatggtatatgcctctccctctcctaccccccatttaccctcagtcatggttccatatttttttctcttcatggcatttaccatgatttgtagttgtacattttaatcccactgggatagatatcttccatagctggctctgccgccactgtatccccagcctttagtgccctgtgcctgatgaatagcaggtacttaataaacatggtttgatttgtagcttagctggctgctagatgaaaagagaagagaagttatttctgaagttatcacacaatcacaacatcctggaaaaacaggattctggttatcaaaatttgatttacacatacatcctttgtatttattataccatgtttcaaatataaagagatgtatatatgaaataaaataacgaacactcaaattcccaccattcagctctatcaaatttacagattttgccataggcccttgaggtctgttgatactgttatattttaagaaacaaaacatctcaaatccaattgatgtccccgtgtcccttccctgtccgtgctcctgtctttctgtctccagaaataaccattaccctgaatttgagtttaccagtctagtatgcatttttatactatgactatatatgtacatagtcatagcaattacagggcattattttgcaggttttcaagctgttatataaatattatattttgtataaaattatatagattatataaatactaaaaatattattacctttttggtctatttgtttaactacatttttgcatatagctatgtagtgttttgttgtataaatataccacaatttatttttccatttttctgttgataaacattttgattgtttacagtcttcccctgtaataggtaatgccacatacaattaacattcttttacatatttttttttgtcacacatgtgagggtttcttagtctaagatatatacctagaagtaaatttacagggggaaggaggtaggattgctctgattttctttgattcggccaaagtgttctacaaaacagttgtgccaactgatgcttccacaagcagtggatgagagaagctgtttcaggtttcagcagttggtatcatcagacagatctgtatcaatcttttagtgtgaaatggcatcacatcattttattttgtgtttccctgacaatgaggaaggtcgaagatctttaaataggtatcttggccaatcaagttttgttttataaaaatttgtgtccatttcccttttagagggaatgggttttgttttcttattgatttatacagtactttatatattctggatagcaattctttgttgttaacatgcattgcaaatgtctttttccacactgttgctaggcttttcatgttgtttatgatgttgctttattaatagcagtattcaattttaatatcatacaatttatcaacctattactttgtggtttgggctttttatgtctcatataagaaaaccttcttcatttccaaaattctaaagattctaccatatttacttataaaagctttacagtttggctttctacaagtagtccagctggaatcattgttatataatataatgggctctaattttattttattttttgctgcataggtaactagtcatctcagcagcattattgaatgcttcattttttggtcactgattgattgataccaagtttgcatgtatgtgtgtgtctctttttggattctgtattatgcttcagtgttctatttttttccccatgacagtactactccttgattattcctgtagctttagagatattattgcatagggttaggtgtaggggcttagtagccatgctgcttgagtttgaatcctaacaatgccactgcctagccatgggatcttgaaagagttccataatctctttgtgtaccagtttcttttttatctgtaaaatggtgacaataatcatatctaacttataatggataaaaagcttttgcctgttttttgttttgttttgttttttgagacggagttttgctcttgtcacccaggctggaatgcaatggagcgatctcagttcggttcactgcaacctctgcctcccgggttcaagcgattttcctgtcacagcctcccgagtagctgggattacagcacctgccaccacacccagctaatttaatttttgtagttttagtaaagacagggtttcaccacgtttgccagtctggtcttgaactcctgatctcaggtgatctgcacccccgccctgcctgcaccggcttgccaaagtgctaggattacaggtgtgagccactgtgcctggccttgcctggtattttaataaaccttaaaagttagcagttttagtcatagtgtgagtatcagcattattattactaattgtgatatctgataggtcaggtcacttctaccctttcttcttctccaaaatggtcttaaacattgttgaccttttgctctttcacatgaatttcaagatcagcttatagtgcttcatgacaaagttgattgaaaacacaaatgtcattgcattgacatatggattaatttgattctccttatccgtaaacttgacataactttgtttattcagctcttttatgccaattagaaagtaattttgtaatttattccacagaggcccacacatgtttcttagaattatttttagctgcattgcagtttgttgttgctattgtgaataagatttttttcatcttattaattattattattacagcttggattctggtgtcaatgccatgttcttttttattgatacataatatttgcacatatttattcagtccatgtgatattttgttgcattcatagcatgtgcaattattaagtcaaggtatttggagtatccatcacctagaatttttactatttctgtgtgttggtaacatttcaagtcctttcttctaggtgttttgaaatttacgatacatttttgtaaactatagtcatcatactctgctgtcatatattagagcttatttcttctatttcactgtatgcttgtattcattaaccaacctctcttcatacccctcccaacccccaccacacacacacttcacagcctctggtaactatcattccactctgtacctccatgaggtcaacattttcagttgcatgtcagctccactgttgggggcagtggggtcactgccaatggttcatgctttggccctggtgacagcagccaggagcagcagctgctgcaggtgggggaggtcaatgggtttccaagggtgtggatatgcagagactgttgcaccctagggcaagatgcagtgtagcggaggctgggctctaaaaatggcaccttgctgtagctagttaggacttggggtatgtgtgggacccaatgtgagctccctctctggagcaatgctgtcatgtggattccaggcagctccctatgttagtctcagggcccacaaagatcaagggactctctcacggctaggattgctggagtctgtggtgggaatgtggaccactgagggtctctcacttaccctttcccccacattggagagcttttgcaggctctgagctgctccctactgaattggatgcctcacttccctcttcctttgctttcctttcacttttctgctgaattccagtgtcctctcttagatgacttacttgaagtgtgattatctgttcactcttttggctcctctttgtggaggaggtgagtaccagatacctctagtcagccatcttgaagcccctcagcgttattattcttgaatgagttgttactgctctgtagaaattctgttgttacctttatgttgatcatgtatctggccaccttgctgaacactgactaatgtttatggtctgcagattcccatgaattatttatgtaaacaaaccatttatgctttaatatagctttgtttctgtctttctaatatgtgcctcatatttatttttatttttcttttcttaaaatgttgactaagaactcctaacagcattaaagaggagtattgatagcaggcatccttatcttattctaaccctaatggtaactttatgttgcattattaggtttgattcttgctatcggtttttggtagataatatttatcaagtttagaaagttaccttttatttctagtttacaaagatttttagacataaaagaatgttaaatttcatgaaatattttttggagtctcttgagtttatcatggattatctatttttaatttgttattattgggtagtactttaatagattttctaatgttgaaacatctttttatcctaggataataatacacattggtaatcaatagtgtttcaaagaaatacttgggtcttttcccaaaggacaaaaaacctgaaggtttcaagcaattactttgatttgattttacataagttgtttttagatctttgtaggtaccattcctttatctctgtcatcttttggcatttatttattttttaatatggagcatgtaaaacgtgtataatagtaacaaaagatatgaacagtgggagatgaggaaggtggaaatgttagctctacttattttggaccacaaaatgagggttgctagaatctcctctgaagtactggatttgaaaatcgatcagccaagaatttctggagtcactcaggcccgtgccatataattacattatttgctgaggaggttaatcaggctggccatttgtctaaagacctggtgacacctatatccaaaattattttcaaaacgagcccttaactgccccgcataactgggtcctgcttgtgagctgcaagggcttgacttcttaggagttgtcctgtgtggcactgatgatacctggtgatggaaaatgtgtctgctcttattcccttacagccactttgttttctctctatttttactcgtctttagtaattacatgatttttgagactaacatacatgtaaaaccttttgtagatctgatgctaagcaaagaaacgatgttctgctcaataagtagagtttccatcttacaaaattatttcagtgcaattgcttttggtggtaaaatgccaagcattgtagaaatatgattttgatggtggttgagcagtactgtttctgtctaattacactcacgtattcatacaattactgtgaaattactgtaccaaaagcagtatatacacatagtaataataatgcaatgttctgattggctggctttttaaaagatttcagaaattgattaaaacatttaatggttcttctttcaagtatttgtgaaccaaatttcttattccaattgaaaatatgttacaaagagaatattcatttctccttcccccttcatcatgtagaacatagggagaaagatacggaactcctgggagttatctccttgattaactatgaagtaataaacagaagaaaacagcaacaattcatgtagttgggtactaaatctacacctttatggcctgcatttgccaactgtctccatatttgacagataaagtgcatctgtgaattttaagtctctcgggttatagttaagatatgtaattagagttccagatatacatcttacctaaaaacttctgctatggggaggggagaaaccaattaagtcagttttactcagcttcaaaaaaaacccctcaacctgaaaactgatgaaataactaatgaggacacttcatgtggggcatgttatttcttgatagagcaagtgtgttctgggacagaggctcttctttccctgaaggctggagtcaggaggtttacttggttaataaaaccacctccttgagacatgtgacttgatgtgtgtgtggtggagggggtagaaactagtatttttgaacatttgttatatatagtttcctaagcatttatacttatcagaagaaagttagctatctgagaaactctattaacttaaacaggccaatgaagagctgcttcaatgcactgaagcacaaatgcattacaatccctgggctgctgaggactaattccagactagaaacacttctaataattctaatgactataatgacaaaaagtaactaatatttcctgagcagatagtacatgcaagacttactaaatgttaagtaagtgttaacttatttaatattcaagaaaaacacatggtaggtaataggtcattaatagttagaaactgaggttcaaaacagttaactaatttgcccaaggtactataaatatctcctttgataggttaaatcatttttcttctgtaaaatggaaacagaccagttgattattgccatttataaaatagccttaatgcccttaaaaataaaaactcccttgaataatatatgaggagaaggcaggaagatgctagaaatgtcagcttattagagtaagtatgtattatattgttaacagccaccaaaaattcacatagaaagaagttactagagatcttcaggaagattacaatctaatcagacagataaaacacacacacaagaaattacttgaaataattaaataataaaatgtcaacaaatgcaaagtagatacataattggaattgaattctagtttctgtggaattaatatcattaaatcagatacaaaatgatggggcagggagagagtgggtgactccttctcttaaaggattcttcctgctttcaacataagctggtgattccaatgagtgcatgaggacaaatcaatgtgaagggcccaggaaatgctgactgatccaaacaaagtgaacctggtcattaatgttctcctaaaggtgagatttgagattcaaagaaggtgagacccattgatcagttcagaggagccaagggatattctgatttgaggataaggtggagagagcagattaggctattgatagactgaagaacgagtgaaaaagtagcaggtgtaaaggagggaggcaggagtgagagatgcaataaatttttctaaagtagctgggtcaggaaaatttgaagagctagataaagattacagtagaattcccagggttctatatttttagagggattctgggtaccaggaaaattcaataagaaattctggggttaggacataatttttataaaagatttattaaatatattattcatataccatacaactcacccatttaaggcatatgatactgtgttttttagtgtattcagagttgtgcaaccatcactgcaaccaattttagaacatttttatcacttcaaaagggaactatacccattagcagtctactcccccgtcctcctaataaccctagctgtaagcagccactaatctgctgtctctatagatttgcctattccggatactccatacaaatggaatcatacagtacgtggccttttgtgtccagcttctttcattaagcataatattttccagtttcatccatgccatagtatgtatctgtacttcatgatttttatggctgaataatattttattctatggacatatacacatacattttattaattaatttatcagttcatggacatttgggttgtcactttttggccattatgaataatgctgctatcaacattcatgtacaagttttggtgtgaaaataagtttttttcttttttggataaatacctgcctgtgagtggaattgctggtgcttatactaactctatgttcaacattttcaggaactaccagactattttttagagtagctgtaccagtttacatttctaccaacagtttatgagggttctgatttctccatatcttagccaactcttgttattatctatcattctgatagtagccatgataatgggtatacctcattatggctttggttgcatttcctagttggctaataatgttgagcatcttttcctgtacttactgactatatatcttctttggataaatgtttcttcaaatcgtttgaccatttttaattgggctatttatctttttcttattgagctttaaaaattctttatatattctacatgcacatccttaattatatgtatgatgtgcaaatattttctctcaccttgtgggctatcttttcactttcttgccagtgtgctttgaacacaaatgtttttaattttgataaatccaatttatctgtttttttcttttgtcacttatgcttttagtgtcgtatttaaaaaggcttgcctaatccaaagtaaggagtatttactcctacattttcttttgagagtagtagaattttagctcttatgcttaggtctattatctattttgagtttaattttgtgaatggtgtgaggaaggtgtctaacttcactttttttgcatgtgaatatacagttatcaccgaaccagatgttgaaaaaattaccccctccccgaccctcaccattggattgtcttagcactctcataaaaaattgatcatagatatatattcttattttgggactcttaagtttattccattgatcttcatgtatttccttcttccactgcgtgcagttttgattaccataactttgtggcaaattttgaaatcagaaagtgtgaatcctccaacttttttatcctttcataggattgcttctggctatgctgggtcccttgaatttccgtgtgaattttaggattaactcatcaatgggaaattgggatgcgggcttctccaaactctccaggcaaaactaatgttccatcaggattgtaaaccacaggtaaagatctgagaggaggcaaataacatttactgattacctaccatgcatctaaattctgcagtggtgaatttatatgtcttattgtttaatccccatggtagccttatggagcaaatactccaattttcaggtaataaatatgagtctaagaaaggttgtcttgccatagtttataaatagtgatgtcaagatttatcttaggtttccacattagttattctacctctctccccaaagaaaagtagagtagataggctggaaactaacccttccactcctatgaatagcctttgcatcccattagggatgcaatgtaacatttatgttgtattagactttatacatatatttcttccatttgtagaatgggaatgtgtggagtcattccagccaaaagcagaagaacaaaagaaaatgaatcatacattttcaatatggctacatcataaagttatataagaggaagaatacaaaagatgaaacatgttagtaagagggagctatggtggttcccaaatgacaaactatgataaatatttccccaaaaacaaaactacaatgagacaccccctcacaaaagtcagaatggctattactacaaaaacaaaaagtagccaacattggagaagttgtggagaaaagggaacacttatacactgttagaaggaatgtaaattagttcagccactgtggaaagcagtttggagatttctgaaagaatttttaaaacagaactacctttcaactcagcaatcctattactgggtatatacccaaaggaaaataaattgttctaccaaatgacacctgcactcatacgttcatcacagcactattcacaatagcaaagacagggaattaacctagatgcctatcaacagtgggctggataaagaaaatgtacatatacaccatggaatactaagcagccataaaaaataatgaaatattgccctttgcagcaacatggatgcagctggagcccataatcctaatcaatttaactcaggaacagaaaatcaaatgccacatgttctcacttataagtgggagctaaacattgagtacacatggacatgtagaagagatcaatagacactgggcactggggacccctagagtagggagaatgggaggggaggaagggctgaaaaactacctactgggtactatgctaactacctgaataacaggattatttgtacaccaaagtttagtgctgcaatttacccatgtaacaaacctgcacatgtacccgtaaacctaaaataaaagttgaaaataaagtaaaatggcataaaatgttatagatacatttatctatgccaatgttttgaatttgatattttactatagttacacaggtatagctcttggggaaaattgggtaaagagtatgtgggaccattctgtattatattttcaacttcctataaatacacaactatttaataataaatttttaaaaaagaaaaaagaggaggcaatgtgctgagttttcagtaaagctaaaattacttaaatacttctgaaattattttccttcctggtgtgtgactatatatgaaaaatatcttattaaataatagagaaaatgcatagataatatatctttttcctttttctctctttacttggagtaataaaaagtttgtaacccttggtaagtcttccaaaattgttaattttactttgctggttcaagaaggccaaatctagaaaccactaccatagatgacgggaagctactgaagaattttgaatattaagtggaatgaatctttagacttatgtgtaagacaaatcacccttccaacaaacgacgttaggacaactgcacatgcaaatgcaaaagaatgaagttgaacccatacctcacacaaccctccaaaattaacaaagtaaattatagacttaaatggaggatataaaactcctgcaggaaaacagaagagtaaatttccatgatcatggagtaggcaattactttttacatttgaaatcagaagcataagcaacaacaataaagaacaatagatacgttaaactttgtcaaaattaaaaacctttgtccttcaaagggtaccatcaagaaaatgaaaaatcaggacttggggtggagcaaggtggagtaggagtctccactgatcatccctcacacaaggagattaatttaacaactatgtacacagaataaaacaccttcataagaaccaaaactcaggtgagcattcacagtacacagtacgtggttttaacttcatatcaatgcaagaggcactgaagaggcaggaaaaacagccttgaattgctgatgccgcctctctcccatgccccagaggtgacagcatggtggagaatgctactgtgtgctggcaagagggaaatcacagcaactgtgacacatttaataatgtctcagggcatttaataatcaaactcccaaaggtcaaggatagcataaagatcatcctaaaagcagcaagggaaaagaagcaaatgacatacaatggagctccaataaagcatagagaacccagaaacaaatccatgcacctaaagtgaactcatttttgacagaggagaaccaagatcatgcactggggaaaagaccatctcttcaataaatgatgctgggaaaactagatatccatatgcagaagaataaaactagaccccctatctctcaccatatacaaaaatcaaatcaaaatggatttaagacttaagtctgagacctcaaactataaaaccactacaggaaacattggagaaactcttcaggacgttgatttgggcgaaattttattgagataccccaaaagtagaggccaccaaagcaaaaatggacaaatgggatcacctcaagttaaaaagctctgcacagcaaaagaaataattaatgaagtgaagcgacaacccacagaatgggagaaaatacttgcaaactacccatctgacaagagattaacaaccagaatatataaggagctgaaacaactccataggaaaaaatctaataatccaattaaaaaatgagcaaaatatttgaatagatatttctcaaaggaagacatacaaatggcaaacaggcatatgaagtagtgctcaacatcgctgatcatcagaaaagtgaaaatcaaaactacaatgagatatcatctcaccccacttaaaatggcttgtatccaaaagacaggcaattgcaaacactggtgaagatgtggaggaaaggaaacccttgcacactgttggtgggaatgtaaattagtacaatcactgtggagaacagtttgaacgttccttgaaaaactaaatatagagttactgtatgatccagcaatcccaccgctgggtatataaccaaaagaaaggaaatcagtaaatcaaagagatatctgcattcccatgtttgttgcagcaagaacttggaagccaaaatttggaagccaaaacttggaagcaacctaagtgtccatcaatagatgaatggataaagaaaatctggtacttatacacaacagaatactgtttagccatttaaaaacatgagatcctgtcatttgcagcaacacggatggaactggaggtcattatgctaagtaaaataactcaagcacagaaagacaaatattgcctgttctctcactcatttgtgggatctagaaaccaaaggaatagaattcatggagatagagagtagaacgatggttaccagaggctaggaaggatagtgggagggttgtggggaagtggggatgtttaacgggtacagaataaatagaaagaatgaataagaaatggtgtttgatagcccaatagggtacaatagtcagtaatagtttagttgtgaatgttttaaaaagacaatgaaaaatctactcacagaatgggagaatatatttgcaaattatatatcagataaaggactcacatctagaatatataaataattattacaatgtaatttaaaaatttgtctaatgattttagtagccatctcccgaaagaagatatataaatggccaataaatacatgaaaagatgctcaacaccattagaaatctgaaaaatgcaaatcaaaccacaatgagataccacttcacaccggcttgatggctactgtcaaaatgatagataataaaaatgattggcaaagatggagaaactggaatcctcatacactgctgatagggaatcaaaatggcacagcagttttgaaacatagtctagcggttccttaaaatgttggacatagaggccacacatgattcagtaatttcactctgagaaaaataaaaacacatccacacaaaaacttttacatgcattttcaaagcagcattatttttacagtcaaagagtggaaggaacctacatgtctgtcaactgattaatggattgaaaaatgtatgaggtccatacaatctaatattattcagcaattaaaaatacagatacatggtacaacatgtatgaatcttggaaacattctaagtgaagcaagctagtcacaaaagaccaaatattatataattctatttatatgaaatgtccagaataggcacatctatggagatagtagtttagttgtttcctggggctgggacaagggagtaggagcaggaataagaaatgaccataaatggggacagtgtttctccttgggctgatgaaaatgttctaaaattagattgtggtgataaatgcacaatgcagtgaatataacaaaatgcactgaactcactttaaatgagtgaattatatggtatgtgagttttatcaaaataaaactcttaaaaaagtcgggggaggatcactaagtgtcacagtggaggacaggatgtaagaagctgagatgatagacaaggatataagcaaagaccatgtttacatagttcaggaaaattaaaagcagggcttgaactaccatagtggcaatgggaatgatatagtgggaacaaatgcaggatgatgtggtggtaactaggcacactttctctctacatcatcaacacccacttgatagccactttcacccacttgagcgctactgtctctgatgggtagaaacctcactttatttgaaaacacccagagccaaacgtctgtccaccatctcctgagttggcctgcctatgtggagaatcatttaaattatttttactatttgaggcaaaatgtgcttgtctgcaacatctacccattgtctttcattgtgccttgtaaaagtaaatatattactatgataatgtttgaaaacgtttgtttaatagatgatccagatctgctggagattatagactgtatcaatatttgtacaataaaggtcagagagacaattctcaagttagaatttttgaaaatctaaactgttcatcagataggtagatgaagagaccaagccctcatgtggtgtcagaccagctttctcatcccaaatattaatacattttggttgcacatagaaggaaggcataggaaccccattgctatgtggggcttttactgatggcatctttctggaatcctgagaaggtactatccacactcctgtcattcagtttaattgaaatgtgaccctttcaggcaacctaacaatatgtttacattacacagaatttttcacttaagattccccttaatatttaactaacaccactaaagaataatgcgactggcactatagctgtatcagaatgggaaatcaatcagttttcaatcttgtttggcaaccctctcactaacccaggcagacagagacccggggaaggggagaaagggatgttaggccttgagccagaggtgaaattaaatctgctttgtatctattgtgaaatctgcctcactttccaagtgctaacaaagggacaaactgggagaggcaggtgcctgatgtgtcttctatctggaaaatcgggaggtatcccaagaagtcacgctcattgcttctgacactttctttaaaatattgctcttttcacccatacaatttttgtcagtaatcctcaaaggaagataatacttggaatttcaaatcagcagcaccttgatggcaaagtcaggtatttagaacccaatttaactcttatgctcccaaacagtagaaataaaaacaacaataacaataataaagttattttacattaaattatcatggtacagttacaaagtacttcacatatattgtcttaatttacccagtggagaaaactgtgctgtttagctattcaatatatgttttgtttgattttattatgaaaatatatgaagcaaaaagtctttctccatagaaaaatcaagtaaagcccatagaatagttattagcctagcatatatgagagtgctcagtgtaggttctttctcccttctgcccctctaaagctactttggctaataggcagtaaatgttcctaataccttcagcagtagagattagttatcatttcccccattatgtacaagaaggatccattaagcatcccaagtccagggaagggaaagggatgccaagaagtagacaagaggtacgagagtaccacatccccctttctcccacaaagacaatcatgccaagacagtaggctgtgttcttctgacctactagtttgctcctagttagaccgtagacttaatcttgcagcattggttcttgtggaaaacaggatgatctgttggaataaactgagtacctgagatacaacacaaagcaggtgaagcttgtgtcagcgcctctcccttgcatggacccagtgggagataaagagattatagaagaaaagaaactgaattaccaggtcttcaataatttgttgtgatctattttttcattctatttacttttaaacctactttgtatttgtaattttattttttcttaaagattctcacttccttcagtaatataggccacacaagctagatccacccttgaagagaacttaattcaaaagaatcccacagcaaatgactgcaaccttcacagccaggccagattcaggattcaatgctaaattagtggtggattcactggtgatgccaaattggtgatatcaaaagacaacaaaccaggctcaaatatgcaagttgaatgcagcattttttttttttttttttttttttttttgagatggagtctagctctgttgcccaggctggagtgcagtggctctatctcggctcactgcaagctccgcctcccgggttcacgccattctcctgcctcagcctcccaagtagctgggactataggcgcccaccaccacgcctggctaattttttgtatttttagtagagacggggtttcaccgttagccaggatggtctcgatctcctgacctcaagatccgcctgcttcggcctcccaaagtgctgggattacaggcgtggcagcatttttattattctgaaactgatctaattttgatgaatttttaccttcctcctaggtggcagaaaaagttcaacttgttagttctgtttcttatttttgattccacttaaaatgctcccctgcaagaaaattcttgcccttttcagaattcttcccttccccatttccgtttccaaagatgattgctgagtacaagggtgggaggatgtctctcagtccggtgtccaacgggaggggcccctctgatctcatggagggtgcctgtgccttttgctgggctcccattgggtcagcattaagggggctgcctatgctgacaacaactgaggacacacccctttaaagctcaccaaacactgtcctcctgctattgacgtctagaatgcagaggaagctcctggataccttctacaccacacaggcgttaaagattttggagagctaacctcagggcatgttactttggtggagctaccactgtgatctcctcccagagcacagttgtccccctcccccaggaggcatcaggatgtgtcttctctctcccctaggaaaattccatgtcttcatttctccccacaggaaaattcctctggaaaatagcaggtccttccgttttctcttcctctcttgaacgggcttcctcgaagtcatctccttcttactgggtcactaagcctcccagctcggtagacatggaagaaaaggtgtccttcctgcattatagaaaaagcacagatatgccagatgtgtgcttcaggcctggttcttgatgtgttaattgaggctaacaggttttagatgattcgtttcatttctaacagaaccagttgttcaaaactattgtcttgtttccagtgccaaagctgtggatattcaatgatgtttatcactctccccctgccgctgcagtcctaccctgcactgctaatcctccctcagcaaacagatgcccctggaacaatgtaggggtgagcacaaagaaattcaggagaagaaagtacattcatgtaattcaaaattgttatctctatcataagattagtaaaaagcctttgttcagattttttattgtgagcagtgttgtattttttgttattgtttcaagggataggttgatattttgatatcacttagaaccgagtcggtaaactacatatttatctttgatcaactaagattctgtttttaaagaaaagaggacatctttggctagtaatgattaggtaacagtgaatggcaggtgccatatggatccttggagcacagacggacatcaaccagcaagtatttctcagattctaccctaaaatagtgacagtatgtcaggtgtggactaatatatgtaatagctttcaaaaggaactgaacaactagcaagtaaagagtaatttatattaaaagatcccaataatagatggactatggcaagaacctctgaactagtctctctgcttcttctctacctctttacagtgtattatctacactgcaatcaaaatcttccttccaaatgtaagtaactgttcaatggcttcccatgggactcggaataaaagctcacactctttacaatggccctgcaggttcctcatctcctacctccagcatcttcactgtccctctgctccaaccacactgcctctttcttattcctccagacctcccaacacagccctgcccccaagacccttccaatgactctgatcctcttccctgcgctacccagtgtctcactccatcgattcctccacatcctgccaaatgtcacctaaccagaaaggctttgttgaaccaccccagataaaataaagtcccctgcctttacccatcactctctcttgcccggtttaattctttctagcacttacattgtgataatttcttttctgcctcctgcctcttttcattggaaaatatattacatgagaggaggtttgctttattcattgctgaatgttcagcacctagaataatacctggcacaaaataggtcctcaattattatacccaattcctcccagttctcttggaagtttctccattttaccattgaaaattccacatccttgtgattcactttgtcccagtgaattccaaacagttggccatcctacccttaatagatagttgttgaatgaaggaaaggaatgaagaaaaaagaatgaggacagggaaggagggaggaatctaggacagaaaagaagggagagaggaaaaaaaggatgttaatattttcttgttctatatgtagaaagcaaaagagtatttttgtaatcttttttcagcaaatgcctggatcaaattcaatatgattttaaagccatgagaccctctcattcttggttttgatgttgcacggtatcataatacatctgattggaatttcaatatcaggtttaatatactatgcaagctggtataggctctgaaattatgcatattcatgagagcaatcacacccttacttttgatataactggcaaagtaaggtaccacaagagaacaataatcaaagaaaaagggaggactaccagttgttatttacttatgacattttactggaaaaacttaagcaacatgaaagactatttctaaatgaagtactaaaactaacaagacaatgttataaagtgtcatattttctttccttttatacaataaaacattgaaaagctccaccactatgcagccacttcaccagatgcaataatatccaaatgtgaaagtaattaataatattgtagttttaattcccttggtatttcagagatatcctttgaacagcctaaatcaaatcatactggtacttatgagaaatagatatctcttgtgagtccttatattgtgcttcccaagaacctacagtgcatttcagttatttaccttgaaaattcttcagcccatccagagtgggtttggaaatttgtaatcattttgtagaatgtgataagggaggacctgtcttcctaaattctcaagcttggaattttcaagtcagtgtcaggaccataggctctctaatgcatatatatttgccctgagcaaataattatttatctctgtgcttcggtagttgcatctgtatgttaaaaataagattattgctatgttgatttcttatgacatgagagaagaggctttaaaaattaaagaaaagaagaaaacactttaaacttaagatgggaatcatatcttattctttcatattcccagcgcctagcagaatgcctggttaactcaccgggggcattagccagttccttgtctactacatcattccatcttgtatcattccacgctttgaagcaggtactattacaccctatttgtaaggcttagagaggtctagtggcttgcccaagaacagaccacaagtacacagcagaggcatgattagaaccctgcccttctaactgcagtctggtgctctttcctggacacctgcacatctcttccagtaattgaactgacctgcatgttaagcatttcacattgctctaacacaccaaagcctatctacagaaatgttcagaaagatttgttcccaagccctcttccatgtcatgtatgcactttgttcctggcactctttgcagaccatctctctcccagcatgaaagttgtctataaaccctgtgtagtcgaattgcaatttggaatctctacaggagcccgactacattaaaccaatgcatggattaacacctacttcaacacacacaaccattctccacgtacatgggcagtttttacccaaccaaacaataacagacaggttctactcatacagaggaggcattgaaaggcacagtagaaacacagacacgcagtatagtgcttcgtgtccaggtgcattaatgagctgtggcctcaaatcccaggttcgccaagagtgtttctgctcatgtatcaaagcaaagtcatcctgggtgtgagtggaaatgctagttgcattcatgtcagcactagacatttcctggaacccattaaacaagattcattttccaaatggattttgttaatttatttttttttccttttgtagttagaaacctaggggaaaattgagaagaataaatgtggttaaactgccccaggggatggcttgtctgtagaagcatcccaggcataccgaatggcgtacaaaacagaccttaatgagtactgcttgtcaaaggatctgatatgcattttgcagaataaacataactcctttttcagcagttgatccactattctctagggaaatgaatgaagggccatatactgctgtctttgctgcccaaacatacacttgtttgaagggaaagcaacaaaaacaaaacaaaacaaaaaaccctgctggtttctctattttctaattacgttttctttccaagacatattttgttgtattggtacaaaatacgttcagtaaattcaaggaggagaaaacattccagtctgaaatggatttcagcttggcaaaaatgaattaatagaggcatggcaggtcacttatttaactaagtacaggggctgccctattaaccttgagtgagctgagagaactaaagaaaattctttgtttgtcctactgcaaaattggccaaggcaaatcaaaacaagatgcctgggcaaatcaaagtgacacgttcaaaataaaatcatgttaatactggttgcaaatgaaactttattagcaagtcaactttagtagaagtgctgtctgaatgtaaaaatctgactgcttgaaaataacacgcccccagtaattaactctcctaataggactacaattaagatctcgtaggacagcatttcgggaatttcttcctgcttattctcaccatatatatttcttatggctgcaggttagtttatacctccaaatatcatatttctcactagaaatagcactgagtaattgggtgctgcagggcttactgttcaatactgagtcattttgattagacccatattttatcacttgtgccattagcatcagacatttttttaagccatgaaactcctatgttcttggatttgatgttcataaaattaaggaaatcagtttctaccatctatttttctcttcaaaaatcaaattacgtgacatctcatccatgtcaaggcagtctaaatcactgatcattttccatctgaggctaggtgtgaagctaatccattttctgtaatgaagcagcgaagctaaagaagggctgagctatactctgaactatggaaataatggatctaatttagatagttaatccagccatttctgaatagtgtgcactcatgtttgttgagctaataatgtccatcttaaatcaagaagacatttaaacctttatggaatatctttataaaatatcaacctttatggaatgttattaaaaatgtatgtatggtaatggacaattcttcaccagtgctttggatattctgccctcagaccaaagatgcttatttttcttccttccctctcttcttccttttctctccctctcctctttcctttctttctcttagatcttcagtaatttctctgtactccatgcagcatgtgcagttgcttaattcaatccatcttttctttttaaaaatttttccaatctcataccttcctctatttactatgataaaactcttctatacttcataggaaactacttaaaagaagtatgtaccttcaatgtctttctccctaaattttcacttacttctaactcaaacagttgattctttatactaacacatgaataaacttgccaatgacatcttatgttgctaaggcttatgcgtgcttttattgtgtttgtttttactcatttttctagagcatttgacatatctccttgtcaaagtgttctcttctcttgccgtgggggacaccactctggttgttctttcttcatttcctttcttggatctcctttttcacccagaaatatcgttctctccaaggacttttttcttggtactctcctttaatcgctcaatgatttcatacaggcccatgtccttaggtgccacttctttgttcatattcccagcctgctgagactcaaataccagtgctcttctagatgtctctacttcagtacccttttagacaactaaaacctcaaactgtccaaaattagcccctcctttcctctctcgaaattgctctttgacttattttcctaatgttgctaatggatgaggcttctatccaggcctaaaactagaatctcagttatccaagtgtcttttgcatttaattttacaccagatattatctattctatctcctatctgtgtacgtcttcccattcataatgccttttaattgtcatttcttcagtgaattacaaagatatcttctgaaatattatcccttcttctggtatggcttcctgcaatattcaattccaatgtcatgctcttgattaaaatctttcagtggtcgctcactgtttctagaccttagctggaactcttggaccaaaaaatgtgagctacctctgtatccacctactttttttaaaaaggcaacttccgcacttataagggacagtaatccttgtgccagttgaaatattttcacagccatgattttatcacagactgtaggaaacagattctcttgcttctagaaagcatgttttgttagggaactgtgttgaattcttcacctcaattaacctttattttaaaccttctgagcatcagaagtatttactatcttatattataaatgcaaatactttttcctggatcaaataattgaagaataactaggattatgaatgggaaagaaaggtttcctatgcctgagtgagttgagttgctgttctttgcttatcatatataaagagtgagtgaatttattatcatcctggtatgtacatgttaactcaaaattattgtggtactcactgtactttgtactattgggttccaatggtttgtaagctagtgatttatgcacataaatccttaattcttaactaagaaaatttagaaattttaaaatttaataccctattaagaaaaaagggtgaattttcctgtgctctcttatagcaatcatcttatcaaaaattattgcccttttgagaaaagtacatcatgataacatcactttgtatcttctagctttctctgatgttaggcattttttcttaaacaagttaaatattcctcatggaaaaataattagccaattccttaaatttgacaaaaacatcattcagaattgttgctatcattccttttttttcctctttttttggatattttatgtccaggcaaatgggggaatgattggctttatattctttacatgaactgtcttttttcctgcctatcctagtaatatcacagcatctaatttattttcttaaccacataacatatcctttcctcttttctaataagagaatatagttaacttaggcaaatgaagcagtgcctgtgacatattaagtgctattaaatgctcaataaatgtttcatgactgaataaactcaaggccaggtaaacataagaatagagaaaaaataagagtgaagctgtgattggtagttttttgtttgtttcatatctataacctcttggtagcttccccaagaatagttaattgtccatgtgaccaggactttatatccttatgtcacctacttctgcttccttcccccaccagtttctgggaagaattttgccagatcaccagatgcacacagttagctactaaagaatctcttgtctgtctctttagcttctccataaatacacacatttcttcatttgtttttaaggcaatgctgtatgtgtaatcatgtgtgaatctttattgaacacttatggaataagccacctgttcttacaaattagctgagttctcaagaaggcccaaattagtgaattagttgatgaaggaaatttgttgcggagacagcaggcagctaagaaatttttcagcttgtcaaaggtattgttagtctcacagcttggcaaggagagaagaagataccattttgaagaattttaggtagtgtcttaataccttacactcactaaggacgaaaatgaaattgcttgtcttatcagttaaagggaagctttgctgatgtcagaccatagcccagaaagttaactaaaagttttgtagaagtagataatcttttcctggtgatcgatgtggtgagattggaagtgagttgccaggggagtcatggggaaataggcttaatcattttatttgtatttgtgctgaaggcagtgctgaacaaacctctgaagtcacttagccatgtcttttccagggggcatgcaaggcgactgctgatttctacagacactttttaagcgattaccagtgctggcaagtggaactacctttccggtcctcttacaagcatccagtcacttgctgaaatgtcataagcgatataaacctgctgacaggccaggatcattgcatctcctgcctcctccttccacgtaacaaatctcattgttgattggcatatggcagcaagcatcccaacacccagagtggtgttcttatttctgagggagcagggtctgtgtgtgaattgcacacacagggagcaatcccctgccctgatacaggcaacctgagtgcttagttccttctctgctcagaacttagtgtgactatgtggcctacctcacattgtttgtgttacacctacacaggaaaaaggaaaaatgtccttttgattccatgcttgtagagatgttcatccaatttgaatgaacatgtagccaaggtagtgtcttccccctttcttctccttttttttttgtctcataggtgtaataacatttcattttaaaaataaatatgaaaaatggaaaagcataaataaaaaataaacacatttgtgagttttttatgcagatataaatactgttaatattttaatttttatcctctggccttgtacttctaggaagtaatgaatggtctggttctttgggtccttggagccagtgtgggtaggagtggggttggcagggacagtagagaaggatgcaaggaaaatatttgctctggatagataattttgtctttttcatccaatcttatggggaagaaaatgttcaaaattcaataaatattcattgaacacctactatgtgctaaggactatttagatagtagaaacactgcaataaataatgcaaaatgcctttgtgaaagttataatctatggaaaatggaagagagagagtagaaatacccagtatgaaacttgacaattcaatacaaagtagccaaattatttaaataaacactttaagcacctggtatatggcacagttttgagtgatgatgtgttaaattcaaaatcaggaatttttatctaaactgtgtatctacaataatggattatataaaatgagacagtcttataagccttgtttctagatattttatagccttttgacaattatttaagtctgcatgtagaatttatcaccacttaagtagaatctattaggaccgtagaatctcagagatgaatttaaatggtctaccttctctatttctattatctatactacactcctgctcccatggctgaatcctctccctgatacattaagcagtaattatcagcctctttttgaaatcttcaggcacaaaaagctctctacttcctgaagcagcccattccaccaaccagtagctccaattttcaaaatgatcttccttatattaatctgaaattcaagggcccatagtttcttccgctgaaagtatgtgcaagtctctgggaactatctcaggcagttgaagcctggggatatttcttttccaagtttcaaagttcaaattgccagaaagagccctgaaagggtctaaggtgttaaaggtgtccgtaaaactgatgaagaaaataatagcttgtatcaaagagcaccagtagcatgtggaagaatgggttgttaggggatatggctttgatctgccactcgcttgtcagcagagttgattcactcacttggctagttgagaaggtggcccttcctccatgtgtggtcttcctcaagccccatgctaaggcaaagaagttgacctaagctctgtcttccataggtcaaaggtacctgaatagttgagttattttagtagaaactctgaatatggaattgcagtttgaagcagccaaaatattcatttttatagctgagaagagactctaacatgcagaacatgttgtcttggagaagccagtgatgaaatgtgttggtttgagccatagcaacagttcacctttatatgcagaggaaatggaaatccattttaatcatcaatgaaaagataatcattctaaagttcctttccaacatctatcacaaacatactaagtttccttctaaaaataaaacaactgagttttccctccatcttgtgattttcaatggaacctgaaagctggtgtcctatcctcttatgcccttggtggccagtcaaaagagaacaggttttattcattaattacatcattgatttattcaccaaacatgcattgagcactcacgctgtatcagacacaatcgttagtactaaatgtaagaaatcctgagatcctcaaataaaatagcagaatatgggtggatttgagtagactggtttagaagatattgaggaaggtgatttgatggtaactaaatatgagagtagtgagcgcattaagattaactctcaagtttcttatatgaggagttggggagatggtggtaagtccacaaacttgggtaaggcacccaattttacaggagcaacatactgaaggaaatccgtagggaaaaggtgaaatggtgtatttaccaatgatggtatttgggcatcagggtctggaagctcttcttcagatatggaagcccaggcttggtagtgtagtggactttatggtagagaagtagcatcttttctataaagaaccagattttctttttttttaaataagagctcctggttaaaagctgtgtgtcagatcccatatgggggctctaagatctaattttacttaagggccccaaggcacagaggctagccaagattctgagaagataccaaataaaaatcttggaaccaatagaaagcaattttcataattaggaggaacacggcaccccatatatcatcattagtctgagacaaggaacagaaggttggggagggaaaggatggtttctctaaacagggaacaggtggccagtgcagtcagggccagctagggaaaccttaggcaactctgctcgaaaatttctctgttcctcccctagaaactctcagatacagaagaaaacaggatgattagttattggcaattagttattagttattggcaatgggtgtttgcctccatgatagtgtttttgttcttaacagagacacagagaaaggccaaagggtagaatttaatggcacccgtagacactgtggaaaatgaagtgtttttgtatgtcctgataaactgaagttttgatgttacaaaatgtccaaaatgcaatttggctttcatttgaattgcttcctgcaaagttaattgtttgctcccaatccataattgatgatagcttttcccctattgcagttagaccaaggaatcttggcagtctagtgctatagaagccagacacatgcaggtaataacaccccaagaagagctgaaatattagccttcggagacacaggctgtgcaaatttctctggcttacaaaagagacatcagttacaccttagagcctgtcttgtagacttagtttcataaaagttgtataataattttggaaagtacagatgacatgtcagaaaaaatgccagaggaaaagctctggggagcctgattaatcagtttcacagtaggtataaggaatgagggggttctgatagctaaagtagtgatttgcatgtctaactaattttcttctgccatttcttctccattcccatgatatccagtacagagtgaccatgcagtgttgattgatcgaacagcaaccaccacatacatgtcctgccccaccacaaaaggaaggaaggaataaaagaaagaaagaaagaaacaaacaaacaaacaaacaaaactaagcaagacaaaacaaatacccatgtcagtggttcaaagattaagattgtggctttgtgtaaagttctttccctttgtagacttgctgcataattattcaggtatgatggttacagtttttaaaaaggaagggaaattgtggtatgtggtatgtaaatatttttaaatgttgtctctctgttttgatcagtttttgttttattcaatttgtctttattaaatcttatcaaagcaaaacttgttcttcccatttctctgttttgattacaggactactgaatggagagctttctgatttctccaagggaattgttttgtagaaaaggccatgctagatttcccttgccactgcctctttctgcttggaaggtaacctttaccaagagctatagcctcttaatcttttagtggaaatcgctcttgtgaaaacgagccctgatagtatcttggctcactaattcatgccatgccgctcaaaattaaagcattaaaatttcatagatataataccatttataaatcatgtcataaaaacattcattttcttatagaccttgaaaactgggcatgtattcctcctccagctgttgcttaaagttcattacagcacaccagtatttgtcaaaaacaaagctctggtaaagtggggagatatttaggagcaacaccctcagagcatcaaggcactgtcctcccagcattgtgcacatgttcctcccattagtggtcatggaaactgcaagcccacctctgtgtaatcagagattcccggcagaattgtattaatggagcaagtggttctgggagggtagctttatcattctttatgtccttattctgttcacttggagaaagagactatttaccattttccctaaatttatctcctataaaatttcaatatgtttagtggatgaaggcaacagactaattaagtagacggtaaacatttgccacatttcaaaaaatgacaatgacagacgattctttttgccatttacccttaggcagcagatggggacttgataattgtttaagcagcagaaataacttgccctaatttactatctagttttttgtttgtttgtctttgattatgcctgaataaaaaccttttgtccatttgaagtggtggaaattagaatatccattttgaggtgtttctgggatgtacatgccacatatttggcttgcagatgctaatgggtatctaatcacatttgccaaccataaaatccctattggtaaaacacttacatctgcaataatctgccactttcttgaaacatgctaattttcttaaataatgtagaggcctataaggacttctattttatgtaaacaactagatgtagtaaacaatcagttgcaagaggtcattatatcataatctggactttgttacttttcagaagtttggggtttttgtttgttggcttgtgttgtcttgttttaatttcatcgggctagcatttcatagtagagtattaagatggattctttgacctttgatatgaaaagtagctgaaccatctttttattgcttgatttgttggattggagaatattttatctattcagtattaaagattagccctaggaaactgggagctgctctaaaatatggaatttctaagtcgagtgcattttctccaggctaaaataaacctagacacagatatttgatagtgtagaattcccttaatcttttaggcacagcatctgtatgctcattcacatggactcgttttacatacactacctacccatgccaccaggatcatttatctggtatgtaaaatctgatacgtgtttttgtgctaattgaaatattggtttgtttgttgtcagcctcagatgccttctccaacaaggctaaaaacaatttcaagcagaatataaataagacgcatctgaggatatacctatgcatacacaaatttgtgtgtgggtggacatacatatattctacacaaatgcactgagggagagagcaagagtgagtttctattttcattctgtcgtgcttacgtatattcatatgatttcacattgggtatagctttggatctgagaaaaccagactattatatgtctggtaacttcactggaaaatctgaaagaatctaaattagccagtcctgctgatcttttggatacatgaattcatatgtccactaatttgttttctttttgctttttattgtggagaggggagaaatccaaacatacacaaatataaacagaataatataaaagaaacctctatgcatcgatcaccagctccagaaaataccaactcattggtctctgcagccccatcttcatcatcagtcacatcttcccaacccttctcccacctgttttttttgaggcaaatccaatagcatattatttcatttcaaaatattttattatgtactttcctaagataaaaacatagtttttatatatgagtagaataccaatcccacactaaaaaaattcaccgtaagtcttaatgtcatcagatctccagtcaatgcaattatctaatgcatcatacattttttaagaaatcataattcaaataaaatacatacattgcttgtccatagattgatttatcttgagactttttaaaacatatgggtactcctctccttttctttttttcttcttgcagttcatttgtcaaactgcaagggaaaaaaatgattgtttgtcctgtagcttctcacagtctagtttttgctgattgcatccccacgatatagcttaatatgttctttggtctcttatttactgtacttagtagttagatctagaagttttattatattagatttttgtggggttttcttttgataagacatttacatatgtggtcttttctacttaataaaaagcacactatatgctttatctctttttgaagtgctagccattaatgttcaatgcctaaatccattagttgattagagattacaaaatactggtattcttatcttctcataccttcatcatttattagatgtgatatttttataataaaaatttcctcctttttattctttggtgaccagtagtacaactagtgtagccaagggaggttaaactcttgattcttttatttacagttttcaaaattatcattagttccctacagtatccctcggtactcaataattttttactatcatgaagaacacatggatttaaaatttgttgaagtatttcaatctattgcatttacatcatccctgttgatgctcaaattgtcccatctttggcctgtaagaggctctaacaggttgttctacattcttttgacagattcatgtccactcttcactctgtaggggatatggaatcccagggattttggaaattgctgctaccctctccctttcactaggcctacgctttctgtttcttgctctttccggatgttctgtcacatgactttaacttggagatagctcctgaaggagccagtgtttatatgtaaattattgagaaacacaaaagtgccagaacacattagttttcaacaacctgttttattcttctcacatttttatgttatcttagggaaccagcttcacctggtgtttggaattctaactttttggtagccccttagccccaggtagcaaattgctgtactctttttgtgtcttcatcactgtgtggcttgtggtagtcacttgaatacttgttgaatgtatcagtgactgaaagaacaaataaacaaataagctcatgatctctctttaatttaaggcataaatctattttagatatggtgccatgaaacagaacaatcttagctgataagagagagttgatattgcatgtgcagggtgagagtacatttctgagtcatttgggagaggggcttcaataggaaactgtcccttgaatggaaaagcattccctgtacagtctttcagacactaattttgacaagcaccaaagcaagacacatgctttggagtgttatgggattttatgccaagaggttgaaataatttaatggatctggagagggtggaggtagcatagaattatggttgctttatccatttttttctgatctgtttaggtgatttatctattctgatttccctgaattgtttagtgctgagatttcatggaaataggtgttctaaaaaccactaaatattgttttttaattacctcacggcctcaaaggaacaagtaatcctcatcttctttttattggcactaaaattctctataaccaccagatcccataaagatcattctttttaaagccttgttttttactaaggaatgttgattttctagatacatcactgcaggatggagtcaggcaaagaataattattgtcattcaagtcagtgtttcataatctatctgggtgctaagagccaccccaattgggaagagtgcatgtgttataataaaattatctattcaccagacaaggaaagcaataactttgtagcatgtcatatgtctgtgttcacatatatacacagctggggagcaatggtaaacagtttcctaaacactcactaaattcatgcttatcaagtgtcttattccttaaaccaatagtctacacagacatttttactgtactcactccaaagtaaataatttttgagcatttaacctcagcaaattaggttgaaccatatgaaattgacaatttgtgggtcaaaaatacttgaacattggcaatttcatatttttcaaccttctaattttattagttacaaatatgtacatatgttaccatcatcattaattaatataacaagcacaataactctttgggtaaggatcaataatatattgggtgtaaatctgcatttccagtagtctcttgggtaatttctaaatcattgagttagttctgatgagatcagaccatcacagtttttactctgatactgtggctagctagaaacttgccctaggagatatgtcagctctgacagtttcttcttgtgtctaatgtgcttgccttgttactatttttagtcaatctatgttttctttgcagaaatctttttacgccgcttgtccattttgagagggctaattgataagttgaaactaaataatataatacatatataaaccagtttgactagaccattttattcagaatatgttgcacagtactcaaagagaagatttcacatgttgactctgacgtgcagatgaatgatggtgccgtagacaattaggatattagattttagtagaacttaatttatttctaatttttccagtgacacaatggatataaatgaaagttcaaacctagtttgagttgtgcctcccacaggcagtctttccatgtggcttggatttataacaacttggtggctgggttctgagacagagcatctgaaaagcaagcattccaagaaatcaggtggacatcggatagactttcatgacccagccttggaaatcacatagtgtcacttcctcatccttaattaattaaagcaattacaatcccatgtagatttaagaggagggtacatagatatctctatagaaggaatgtcaaagagtttgtggccactgtttataaaccaccacaccactcaatgcataaatcccttaacaaatggtcatccacatttactacctctactgacaaggagttcattatcacagaatgtaaactattccttttttgggacagtattaagtattaaaaatattttctcaagcggaacaaaaatatgctttcttattacccagtttttgttctcccttctgccctccggaacacagcaagtcagctttcctttttgcttggaagtagttttcaagtgaattgtgttttcttttggatgttcacactcctagttgctttgactctttcctatttctctcatcatgtggttatcttctaagcagacaatactttatttctatttctcttaaagtactactaaatttgaacccatgtaccatttaatactgcccctgcagactgggttgttaaaatactatttgcgtatgtaatagtttctcaaaagaattatctatagaacaatttattagtgcaaactgttaatatataatttttcagatactcagagtgccagcatactctgagccaatgagagctgatttgggagactataccggatgctgtcaggcagcaaatgtttgtgccccatatggcaaatgttctcagccagtgaatactctattgtaccatactcagttgaaagtcttcagcaatgtttgttatgtacccctcaggagcctttctttctgccctatatttttgtgttctagtgaactgtttgaaaccataatggccgacaaaatgtatgcaagtgatagtgctgagactgaggcaatgaaacccaggaagaatattccactggctattgacatgcagggcttccagcagtttgagaagcctttgatgaaaaggtcaaagtaacagatggtaaagatcagcaggaaattagggattggtataagtccttttgacattctgaagggcattataaaacatccctgtaggattgcccaacagttgtttgaaaaattcctagaagaagaaactaaggttgaattatgtcatgacttctagtgatttaacaaaaatgaaagagtgcctgccactgtataatgatttaacaaaaatgaaagagtgcctgccgctgtataatgccaggaactcatctttacaggaactatgtgcttaggacgctgtgtgatgcagatatactagctactctttctttttcagaaatgagtgtcccacaccacaatcatatttccatattctaggtaaattttgatcagagaagactgaagtagaattaattttcctacaatatgacatttttcatcaactacttaaggtgactttagctttttaaacagctacataacaatgttgacccatcttaagcttcttcaacaaagatctccatatttttttcaggtaaaagtctacaaagcccaattctgttcctcaccaccactctaatatgtaatctgatcatggtggtaatgaggaccatgactaatgtttattgggcacttgcttagctccaggcacaattaagtgcttttcactatttcaggaaatcctcaccacaaacctatgaggtagttgcttttattatccctatcttttgcatggggagtattatagaagctggataacttgcccaaggtcttatagttagtaaatggtggagctgggatcagtggagcagttgggatgatgtcagatgttgaacatgtcatttataatgtcaaatatctatcccaggttggattgtatttgtaaactacatgacagcaggatttgatctgaaacagtgcttgcttggttcagaataaacgctgaatgaatgaatatgttgtaagcctgttgatccatgaattcactaataagcatctgtgatgcaaagcccaattcctcctgctgcaaatcatgtctgtcaatcttaatgtgtacagaaaatgttttttaaagccatgatttcataattgtagggttccaggaaaacatcctcttgggagagtcagcagcattaaggcatagcaatatttttgttcaggatgcattaggtatctctgattttccaatatcttaaatgctagcagcagcttcagatatgaaattacttagtaagcaattctaataggagaaacaagatctaaaagagaaacatataaggaatcctacttctggctctcaatggaaactggcatgagtcatgctagctctaaagaaatatggtatccaccactgaaatcatgcaacaaaagaaacttagctgaaatggttgaattgagctttctcaaaggccaattgacctattttgtccgatggtatgtggaaagaaatgatatacgctacttcccagcagaaaatttcagaggccttatgtaatatattgccacatggggctttttctctgtcacgaggccagcaatatcccaaatatgagtgttagcctgggtcccagagtgaagaagacatctacccagcccattatgataaagcagtactagcaagaaataagctaagtccttgaggacttgggattgttaccacagcatgtgtaacctaagctgactaaaaaattataaatattcttggccgggcgcagtggctcacgcctgtattcccagcaattttggaggccgaggcaggcggatcacctgaggtcaggagttcgagaccatcctggccaacatggtgaaaccccatctctactaagaaaacaaaaaatcagccgggcatggtggcacgcacctgtcatcccagctacttggggggctgagacaggagaatctcttgaacttgggcagtggaggttgcagtgagctaagatcatgccactgcactccagtctgggtgacagagtgagactccttctcaaaaaagaaaaaaaaaaaaaactataaatattcttaaggaaatcagggctgagggtggagaaacatgttaggcataagaggaagaacaacaccttgcagtcccaggcgcttccagagaggcgagagcctaagcgcagacaccacctccaaggcatagttggacacactgggtggaagggcaaacacagagtagatgcacagttcatgctggaaccagatccacagttgagggcccaggaataatatgaaagaaaacagtatcttcatgtggcagaaagtgaataacatttattttagcattcatttcatctaatcttattgctcttccctatcataaccaacccattccataagcccttccttagaaatacatagctctctaccatctgtcagtaccttaaaatcaatcaaatacccagtggatttttattttacttatttattgcttaaaagaatagctttagattatgcatctcaaagtctgtggcattgagaagtcactggcctggaataccctgccacctgcaaaaatcaactaacctatctcacttcaatccatttcaaatatttagtttctaattagatttcatttgtgaaaagggttctacaaccaaaaatgcttaaaattactgcttctgacgaggccacgggctcatttcaactactttgaaatgattatcatcaaattctgtggactctgttttggtctgtcctaatctcaacccttcttttcagagcatgtggcagaagcagcttcactacagagataaatattcatgtgcattgcattttgctcacaggcactgtataaactatatttagaagtctgaatgttgagatgtactgtgtcaacattgaaatttaattactgtgatggactttaaatccatggaccttcttgcactgcggagtgaatattacctcttgtgtttcttcattctcctttacattcctatagaagagggttgcaatctgcttaactagaacacccacctgcccttctcctccaagtgaatgaaatgaactctcagttttacgactgttttatctttgtgttgtgaaaaagaaatattgtcttgctaaactctttggacacttcccaatatgcactatctctctcctactcctattatcactcattctggtaataaatgataatgttcattgctaggatttgtaaagcactgtcaagttagcccattattttaaactcaggttaaagtaaggattttagatttatgtaagcctggtgcagtttcattaagaaccaaaggcattttaatttttctccctctacccaagggactttacacttcttaatgtgacattaatcagtgttttaatatttcttcaaaatgtatctattctctgcatgctatttaccgtctttgtcaaagtcagtgaacaggaataaaaagtaactacatgatatagaaactatggtcttcttggcccttgtgtaatagccaagtggatgctgttaaaagtgaatctatccatggtgcctttcctatttctgtacaggattttgatttcattttaaatgaatgtcataaaccccaggtctgaaaactaatagaatttttgcatttacctactgatccataacctttaagttagactgtgtgtccatttgcagtcagttcgttggatgatgcaatgctttaacactgaatgaaaagatttctgctatattccagacaccagatatgaaggccagtttgggtggattattcttagaatgactttatattagtcctgatgggtagtacagaataagctgtaggagctagctacagtcccttaaatgagaggagacaaggaaagagacgtgtttgataacatgacaccgactcactttgggaggtggaaggctaattaggagtccagggattggcagaacatattgtctgagtcctggtcagtacacagtgagtgtgtacactgttgctgactggctggtccccatggagacattactgctcgatcagttctcctcagcgcctgtgtgtccagagctgtgactgtggctttgagatgcctggctgacgggcaaagttctctagatgctgagagtccggcgaacatgtggaggaggctgcattctgctgcccgtcctggccctgggcagtgtgatgcagcatatgcttgcacacaacgaatcaggtccaaatcccacttctaggcttactggttgagtgaccttgggaaaattatttaatctctaaattggtctcttcatctgtaacctgatgttggtgtgaggattaaatatgataatccaggaaaagcatcccgtcaagttctgggcacgtaatggctcttgataaatggaatttaaaaggagagcctgtccctcaggcagttcaaatctgatctaatgacttccaatggatcaagagacgtggcatgtgggtggaaaagcctgaaggctgggattggtgagtgggacgctcaggttaccaacaggtgtagacaggtcctgctactggctgtggcagcaccagttctccataaacatccatcggttaggatccaccaggccttgaggagagtaaagagggcactaggggacctatccctgggagacctggcataaatccaaaggagaggaaggtgggaaacagggatgatgaacatacagagcacatgtttcttcttttccatttttaccggcagccagtctgctcctgaccagaccagatctcagcctagatcccattcctctttgtactgcatattcccctaaagacatcctaaaagagaatgatagacccagtgaatgcttagtagccacaggtagtttttttgtttgtttgtttaaatagggcctgtccaaagaaatatcacttaaaaaaaataaagcattctacctagttttttttttaatgtagccatatccaaataaagtgtatgatcccttccccacctatctcctccctttcatgttttcttggtttctgcttttctaccacagaaaactccagtgtctttgtgctacgtagaacacaagggatgggtgaatcaaagttgctcagaaatataagctaaggaaaagaagaagtgaattgaacttcaaaactaatagcacaaaagtaatgcacttgatatttgccatggacaggatactgtaaatcagtgcgtgtgctaattggccatttgcctgtgtatccttaaatccatttccctcccttcctctactctgctgtcaatcacaggaaacaccatttgggggctcccttgacaactagcttctagtagttttgacaatcacgggtactagcagaaaactgtaggatgaggaaaggggagaagtcaccgtatttctccctctgccttggggaggcatttccagcaggaagaagctgtgtcttctgtggctccactcccagtagacatccctttccttcatggtcccagcttctgccaggcagccactaggctccacttgttccagcctgagtaactggtttctggaaataccacatcctagaagcagtggcttcctgttcttatatatctttgaattgcctcctctgtccctgattagcttttcaggtcatttatcatctatgtaaccaattccaagtattaaattttctctgtttaaagcacttagagtagtttttatttcctgtgtagatcctgactgatacactggtgatttgaatctattctgctcaatgaattagtagaatgggaaagttaatgtatttaaacagctatgtctctgtgcggctctgaataaaaacaaaaatgcataaataatgtactaagacatttcatcacagcaaaacactgctttggtttctgatatttcatgccatttgcaaatatctccttatttgttattctggggagttttcattagggctaaactatttcacatgacaagtacttttacagcagtttgcaaaaatcatgcactttcccaggttaaaaagaataaccctgaactaaattttaccttcaccttgtgcttcctgacataagtctcatttctaaccaacagaccttcccagcaccctggtgtaaaggaatctacctggcccacaggacaaacgtgccctgaccagctttccacaatccccttctgagctgaaaaaaaatgtattaagtggttaaagaataaaacttggtaattcttataagaattcagacaatgaatggcttataaaatgggccgttaaaataattcatgtctgaaattcagcattaatatgatgcaacatgtcaggtgggggaactgactcctcagagctctactcctaactgcttggctacttgagtaatattaagagaatccatctgaaagaaagggaatagaaatactgacttgttctaagggtagcttaaataagctttgcaaatagcaagatcccactacaagcagatgaactgggcattcagatacctaatgagttagaaagcaattcttccttgatacccagcaccccttcatgcatctagtttttgtccataccaaacttgggaagtagggatcaacaatcgtccttacattctccctgagaggtgggaggagggctccagttctgctctcgtaatccattttttattcagcgtcaccttctctttcaatgggctaagtatcctacaaactggggatgcatcttaattaattctggccaggttcaatggcatttaagagcaggattggcaagtggccttgaaaatgtgctcagtacagccaagttgtacccttgaggacctctatacttaagatgtacctgtgtttctgctccccatcaactgggatccatagatctctctttgtaatcaagacccatactttactgaggttctgagcagctgctcaacgtgaccacatttcatctgccattactttttagtgtcttttaatatgaaggaatgcattcattctgtaagaaaaatgggattagaattttaggaaggctctcaaataatgcaacaataaattcttcaatacccagttgtcagatgtttcagtaaattgcaaatatcagattactttttaaaaatatttcaaacacacacttggaattaaacaagaaccatatattagaaaaggaaataagcttaccttttctattgtaagactccaagcacccacatggatcttcatggtggagattttaacaacactgctaatactgacttacttccaatcagagctgagagagcaaacaaagacaaactctctatggatgtactcatttttttaaacccatatttaaaattaataattttcttaggcattcaatgtgaataataaagctgaactcatttatttaaagttgtaaatttttaaaatagctctaaattagttctctgtgatacaggaaaccagcatgcagaaagccagtaactgcctcactgtttcatccctaactgtgggatcttgggcaagttacttaattgtacttgtgtccattttctctggaaagtgcatatgataacagggctcaccttggttggttattatgaatattaaagtagatgattcatttgattattattcaataaatatgcattgagagtctcctgtgtaacatacatggagcttgccctgttgaacttatggtttggaaaaagaaatagaaattaatcaaagaataatataaataagtgtaattatagctagataaaagctactaaaggaagatatttgatgctctaagaatacatgacaggagactgcacttaatctgtgatgataaaggttaggaaaggttccctaaagaaatacaaaggagatatgaaagattggtaagagttaaccaggctgtgtgcgtatgtgtgtgtgtgtgtgtgtctctgtgtgtatgtgtgtgtaggggctggagtggacatttcaggcaaagggaatagctggcatatatacccaggtttcctctggaaattcaccaccctgaggcaaccactgttagcctcccttccagttatgtttatcttttattttcagctaaataaattttattttgattcaaaagtctggggaattactttgacattaggtgtgtgtgtggtggagggtcctctgatgatgtgcctgtattttttccagagagcccagggcaagtgtgtatgatgcagatttatcctggacatacatcatgggcacatattatcattcattcagaaaatatttatatatttatcaggcacctgcttcatgccttgcattaccctaaacactgaggataaagatgaataagacacaggctctgtctaggactttaaccctcagttgagtgagggaaagagataagaagacacatatttgtattatgccacatcagagttgtgtatgtgaggtaataaattcttgtagcatggaaaatggcctggctgcctctacctgggagggccatgaagactacacagaggaggtcatatgtgagcagaatttaaaggaagcctaagaaggacgttccagaagaacatgtactagggcacctcatctatgtccctaggacctagaagaagagtgcctggcatgtcatacctcaataataaatatctatctaatttacaattggcacggaaagaagttctgtgagttattctgagtggatcaaacatagcatgcaagtaaagggtcaacctgcagagaagtggccagaaatgtaaagagagataaaattgtgaagatgttcttatgtaaggtgaagaatcccagatttgattccctagtttaagtgatggaaagcaactgaagccttttaatcaaggagaatgacataatcagctttgctttatagaaaactcactgtgtcagcagtttaggggatggaaaagtgggagaaaagacttaagccagagagatcgtcaagaagagattatacttgtccagaacagagatgatgaggtttggagggaaggaagatggaaagaatgcatttcagaaacattttgaagtaaaatccatcaagaatacatgggattaaggaagaacaaagagacggggtgatgaagaaatgtttctggcctacatgactgctgacaccattcattgagatgggaatacagaaatgagaaaagggttgagaaaatgcaagatcactttggggcatggtatggataaggtgcatgggtgtatgcatgagggaactgtcctgatggagagaccactgggcgtcttatacagatttgggaatcataaaattgcttcccaggagaaaacagagaagagaaggcacccagaaagcatttggagcccctgaccctggctctatcaccgcccactcctcttcacctcagacttcctggtcactccttcctactcactgagggccctgtggactggctcacatttccccactgcccaaattcctgctcttgctcagccgttctcccttgacaaactagctatcatatcaggtattgaccttttcaggacaagaaaaccagaataaatgccaagagacatcttgccttctctagcatagcatttggggacgcagaggagaggatgtgtgccttacataacttggaatggtggggagtgaaaaatcttacagagaagccaaagactattttatacaaatccacttttaaaaggggaattcttttccacatacaaagaaccagaaatactcattttgtcctccttttttttttgtttaatgtatatgcactcacagttgctaagaattaatactgaaaacatgattttttctaaataactccttgagaaggcacttaaagcctccatttgttatccaaatgtaacatgaggacaagaacagaagaattatttcataaagaaaataatcaatgaatcatttatcagttttcctaccctttgtatgacaaattgtaattagtatgatgtctttgttggcaagtgcttatcaaacaaaatgcagtacagaagcaaaggaagattctgtaaagaactgtgttgttttgaagacctaattgtgatgttatctctggaattttctgtgattacattgttaatttttaatctggtatccttaatagcaacaaggttattagcacctacctagagttctgaatgcccacattagataacacaatcttggcatggtgaacccttggaaataagcatttgcctaagatagaaaagagattcagaaagctctgatggccttggacagggcagaattttgagaaattgaatgtggcagaataaaaagaggttttatcaagcatctttctaaagtgctttcataaattttctctttggtaaagaatgtaccacacccgatcaagagtgttagaattgcttctcagacactttatctgaaattctttactctactttccccaaagtttgttttcactccaataattaatttttgagtgcctactccttgtgatacttgttggaaaatcaaagataaatgggacccagtctctgctttcaaagcactcacactggcatctagtgggaacacaggcctgtaaacaaatggtttcagtatgatgtaagaagcatactgatgtggcgatcataggaacagggatggcagaggagggagacctactcatttgaaataagccacctactcattaatagaatctctgaggattactacgattcccacagagcccatcacaagtagcatgagaaagaccccagggtggaagggggcccttgtgctgccccttctccccttatttagtcagcatggagcccctggactggctttgaacatggctctgaacagggcttaggggataactttcagtgactgctgaaatccagtcatatgactatgtgattttagtcatggctcgtggaaataaatatgctttttttaggagtataaacgtaaaaaatactaacaaaaaatgaagctatttctacatatccagaactattttttttagagacatagcagtctcatcagtcaatattacaaatatgacattcttttatttccatctgcaaaattgttcatgaataaacagaaaagaagaatacacctcatctacccaactctttaaaggttatagcctgctcttagaaacatgtttgtcccttatctcaatacctatattgactttcaataccttctaaagaaccaaaggtctctaataccctcttgttcctctgttttcagaggatgtgtgttaacaaatttaactgtgtaataagttattcttaattacattcggatattttctcctcctaaaggaaaactaaataacaatagataaatagatggatggatgaatggatgcatagattagctagctagctagctaggtgatagaatagatagatgtagatagataaatacatagacaatagataaagctgctcctttgggctctttaacctctttgatcatctttcaataaactatgttaccacttaattagcctgaatgagtacctattgcaatgctgattcttgattttatttatgtgaccactcaacagatatgtctagatatataagagaatataatacaccattcctcatctgtctacagcctttccaaggaggtaattgatcatagtatagatagtgttgcactgtatcccacatcctgttttccctattattagcattttacattaatatttttcatttgtcacattgatacattacattattattaaccaaagttcaaatttcattgaaattgtcttagtttttcaaaaaaaggagagctgttttgccaggtatgtcctgcagaccctggccgagcaatggatgaaaggggtactcagacacaggtatacagtgtaagagcagctaggggactgctgaagagtgaacagtctcgataagctggggctccttgcttttgtttagtacagacataatgccgaaagcctgaagccaacacaatctgtgggtaattaacattattgttcctcctttcagggagcagtcttgtgctggcatggtcaaaggtcagttcctggttaacataagtaaacaagcctgtttacgctaaattcccctacacttccttgtacctactccttgccctctgcctcagggtaagagaacagctgccctcagcttattctcccccaaagctatgcagagccttctgacctttcagaaggtttgcaccctttccctgtaatttctcccaccactctgactgatctcctgcaatgtttaactggtgttatattctaagcttaatcgattgcacacttaaaatgttcagaaaacactcaggatagtggacaagaatcatttcaagtccctgaaacctcaaagtctttagcatatactaaccttcaggtctacatactgatgtgtaattttcaatgcactgtcaataactatcaataacatcatacacacgcacacacacacacacacggccattttggatttgatttttacattgcagttacatatataaaagtgaagttatagattttaaacatttgcatatttcttaaactttctttttaaggatatatagatttgatctctcttttaccctccccaccaaataatggcccacttgacttagggcaatgggggtgtcctgtagttgtttattatgaagaagttgttctcaggcctggagacatgattagaaccagctggggaaattgcttttgagtagcagtgactgagttttactcaggggatgcagctttaattgatctgtgcagtcccctcatcccatctttttataagctccccaggtgactataatgcgcggccaaggctgggaaccactgcattggaaaatgcagaatttatctctttaattcagacaaacatatgaaatgtggaccttgtgtattaacatgaagcctggaagactgctagaaaactcttcgacctcctgctttagctttgtttcccctttgcactcaagcagaattaattacttcctacctaataacgtagtcatgcctcttttattttacttatcatgtagaattataattattttttcagtgcctgtctctccagttagacagttggtttccgaggccgagatcatgtcttgtttatgtgaaatagcctcagcttttaacacaattctggcacatagtagttgctcaataggtatcctagaaagggaaggtgagcataaatcagaaaaaagatataaagtgtagtttagtattaactgaaaataatttcttcttggataagcactcacttctaactacaggaaatgtaatgtagacaaatttgtattttcttgtattctgatcttcgtcagaaataatggcagctatcaatttttttatttaaagaatttaacccagcatctcatttcgggaaataaagcaacatatattgaggtagggattgctaacaagtgaatggctagttctgttaagccataataaaattgaaataatatcagcctgggacttttctctacatttcctatgtcagaacatttgcagtaactgttgctatcaatggatcatactcttgaccagctgggattgtctgagtttccacacacaaagagatggatgggatgctattagttagtctctttagacctgaattcaattttgattgaacatgtttatacttgtgagcttataattatccttgagttcattttaagagatggttttaaagatttcttttttcccttctcactaactactgctgtgttttcagagagatttactagcataaaagatttctggggacattcataaaagggaagaaaatccatagtttagtctgagtctaaaagcataaaccagaggggatgccaggcatctttctactgagtagcttccccgttgatcaatgttaggaagcttgctaatgacactctcatccagaacttttggagagtagggagaaactaacaaaataacagagagccgaggaattccacttttactaatcattcattttgaataatctcacttatttactcagtaaatatatgttgcttgcttaccatatatttatttcagtaagtatatgtcgcttgctgggtcctggtaatgacagtggtgagtttccttcccttgttagtgggatctacagccacctataacttaagattctcccccacacagcccagacatacacacaacgctaagatctgaatgcctgtgcccccaaaaattcataagttgaaatcctaacccccaaggtgatgtgaaaaatgtaccaaaccctgtccagaattttggaatcgcctcccagatactttatctagagactctttgttctacttccccacaagtttttcattccagtatttaatcattgagtgtttctgcttgtgatacttgttgcaaagtcaatgatagtcaaagaagttcaaaaattggttactttggacttaacaagcaaatgcacttctaggtggcttttgaaaaccaaaagtacacctaagtagagagcttctgttttttatagtgattatatgaagagtaatgggtgaaaagcatcaaagctggaattggagctctggggtctacaccgtttccaatgaatcattcctaatgtgatgctttcatccatgctcttggctctgtctgggatgtctcctctccgccaggccctgatttcagtcatccaggccgagtttaattatgtataactgtcttcgtttatttggggcactaaaacaaaaataacaaaaatactatagactgggtgtcctaaacaccaaaagtttattactcacagttctgcaggccgggaataccaagattaggttatctgcagattctctggtgaggacctgcttcttagttcacagacagcatcttcttgctgtgcccttccatggtataaggggtaagagagctccctgagatctcttttagaagggcactaatcctattcatgagggctccactctcacagcctaatgacctcccaaagggcccagctccaaacaccatcacgacaacatatgaatttgtgggagatataaacattcagcctatagccataaccagatgtttttgcaaccaagatggtgaattcttcctgagcacgtgccagtcagactccaggagagcagggatcccatgcacttatgtacttccatccatctcacagcctccatcgctttcagaaggttgagctgcccccaggtaccaaagcaaggactggaatatagctgagagatagaaatgttttgcaaaatgttgcttacagattcagaacttaaactgatttcgatctcttgggaaagaaatatgaattctaatctgatttcaatctctctggaacaaaaaaccttttgtatctatctttcttcaatgatgggaaaaagtaaaataccttccaagcctccactaatccttctactgatgtcttctatattcgtgattcagatgtgccttgtagacaagcacagatcttcactgctcacttctgccataaatgcttcacaaattaaaaaaaaaaaaatggtaagcctccgttagacagaaagaaaatgattcttttcactgtgtttaagaggactgattagggcatttcttcagtagtaccaatgtctaccatatgcttcttcctaaacttatataaaaataaatttctgacaaaaatatgtaaaatctaaacatgtctaactaattctcactgcatttctatgcttttcatggaaagagaaaataacgatgaaacttaagagtattgaaatatttatttttcaaaagtaatctactttattaatattatttgcttcttttttcatggttgtaggttcattgcattgcttttttcttacagacattttgataattgttgattttcataagtttgatagaagaatgccattaatacttctcatttatttttcattatctgttcacattaaaataaattctctcttgtaattttcttatgtatacaaataattggaatatttatgtaagattttgtgttttttttttagttttagagtatgaggttattataagggaactgttgtagattaaacttttttaattatactttaagttctgggatacatatgcagaacgtgcaggtttgttacctaagtatacatgtggcatggtggttttctgcacccatccacccattatctaggttttaagccccacatgcattaggtatttgtcccaatgctctccctccccttgccccccaccctccgacaggccccagtgtgtgatgttccccgtgtccatgtgttcttattgttcaactcccccttatgagtgagaacatgcggtgtttggttttctgttcctgtgagattaaatatttcatgatgaaaggagcaaagtgctgtgtctacatgtgaaaaatcaagtttaattcaatctagatggatgaaatacctggaatatccaagtaattctagtaaaattcgttgtttgattattttattcctcccactaccgtatcgtgtgtgtgtgtgtgtgtgtgtgtgtgtgtgtgtgtgtgtgtgtgtaatgttgctcagaaaatatagataaatacttccattctccatcacaatttattgttttgggtgatgcatatcaatgaggttatgattattcacacacaattttcagaatatacaattttatatcctatgtgctgtgtttgttctctgcagctgggaaactgacctggtgagaagaaaaataggtagcccttaaaatctattttagaacaaaagttattttaagatagatgttacggactgaatgtttgtgtacccttaacattcttatattaaaatcttgcctccctactgtggtagtatcaggaagtgaggcctttgggaggtaattaggattggaagagttcatgagcgtggggtcctcacgattgggattagtgcctctagagtcatgagagagcttgcttcccctctctgctctccaccatgtgaggatacaataagagtcacagtctatacacagaagagggctctcaccaggactcaaccatgtaggcaccgtcatctcagacttccagcctccagaactgtggaaaatgagtttctgttgtttctaagtcacccagtttatggtattttattatagcaacccaaattgactaagaaagttagactagtctggaaatgggaccgccttcacctttcccaagtgaaaagtcaaatttcaaccccacccctattattcactccatccagccttcactgagtacttacattgtgctggggactagggacacaagaactgataagacaggaccctgctcattgtcctctgctcattcccctccaaaaaagtctaggatctgaatgcatgccagtctccacctcatccagtgtataaatctattccaaccctgtggttatgtcactgtgctgagagtgcattgtgctatgtcttgaagacgtctgtcttgtacgttttaaaacatgtcaaggttattataaaataaatgcatcaaagcaatacttttgccagctttcaacttatgaatatggattggctttaataactagattaggacactacttcagaagccatttatctaatgtatttttccaaatgttatttcatcaaaaaatttcctggaaatgaacaagatatattgaggccaagatgccacctaaaaaatattcccttttggtggggcatggtcactcacgcctgtaatcccaacagtttgggaggctgaggtgggtggatggctttagcccagagtttgagaccagcctgggcaacatggtgaggtaagactccatctctacaaaaataaataaataaatacaaaaattagccaggcatggtggtgcttgcctgtagtcccagatactcaggaggctaaggtgaaaggatcatttgacctgggaagtggaggtttacagtgagctgagatcatgccactgcactccagtcagggctatagagcaagattctgtcaaaaacaaagaaggaaggaaggaaggaagaaaggaaggaaagtattctatttcaggaaaatagcaaactaaatttcactaatttttgttatttttgctctttattttctagtattttttggaatgtaactggataagttaaatgaaatgagtaatgtaatttgatggaagtatgtagttattttcagatgaataaaggaattaggacttgggtcttggtttccaaaaagagaaaattaaagggtaaaactacataaatcattagctccggaagtaaaggaatttatttttcaaagttgaaagagaggattaaagaagaggaaattaaattgaaggataaagaaagaaaatttaaacctatagaactcctaccaagtgctggcctgaagctaaattccaagttctatgctgtatttcattaaccctcacaacaacctaatgaggtagggataataattcgcatttacaaggagtaaacaaccagtcagtggccaagccagggttcaaaggtagatttcctgaaggaaaccatttggaatcagcgatctagagactaagaagggggaagaagccttttgcactggaatgagtaaggaatgggaaaggagataaagagactagcacaggcagtgctgaacatgaccagttgagagcaaggaaaggagagatttcaaagcagttaagaggaagtcctgctagaagtagacagagcaaaatccaatactgggtcctggatggcgaggaaggtatccttctaaccaaatgaatgaaaacgtagcaaatgcagacaagttcaaggaaggaggggaagactgggaggaagacatttagagactctgaaatagtctctaattgctttgcaaagtaagggatgagatcaccatgtgagtgagggaggatgttaatgggacttcaagaataaagaaaaagatttgacaaaactgagaggcctaactacagacagcttggttaaggattgcatgtacacataggaatgagtttcagtgtgcaagtctgacagggtaggttcacctgagttacgaatggggaatgtgtcagtggggaggcagaactggtgatgtggagagaggagaaaagggtcaagaacgtgtgttcatgcgcgcacgtgtgtgtgtgcgtgtgcatgtgcgtgtgcctgtgcatgtagaagaagatcataagtgagtgtgggtgggtgaaaaaagtgtttaagtggatcagtctaaggagggaccaggaaggggaatggggaataggagcaggaaaggcagaaaagtaagcttgagaactcccaaaccgttttgtttgtaatttgttagtacagtataataatactaaataatagatttgtaattctaagttgtaagacaaagaaaatatgctcgttaaaaaaaaatcttaaatttgatagcaagttagggattgatttctgaaaaacagcccccaaagcacaaacagtaagagaaaagatggatgcatttgattacttttactaatttatttttaattttattaattaataaattaatgtattggttttttaatttaaccaatttgattaattgattaattttaagttaaaatgcaatgtttctgagataaaaagcaaacacacaagccacagtaggaggaaataattataacacatacaaacaagagtagcataaagcacacctaaaaaaaaaattaaagaaaagacaaacgatccattgcaaaaaaatatgcaataacctgaagaggcatttcacagaagaagaaacatgaatagctaataaacatctgaaaagattatcaacctcattagtaatcagagcaatgcaaattcaaagcaaaattaaatatcactttacactcaccagattggcaaaaattttagtctgaaaatataagtactactgaagacgaagagcagcaggagctcttatatgctgtcgataggagtataaattggtcccaatcccttggaaaacaatttggaattaccttgtagttgaacatttgcttacctttctacctaacaattctactcctagatatttccctagagaagcactagtacaggtgtgtgaatgtttacagaggtaatgtttgcaaaaggaaaaggaaaactggaatcatctcaaatatccattgacagaagggtggctaaataaattgttatgaatgcataaatggattttactatggtagtaaaaaaatgaatgaactgcagccataagcattaacagagatggatctcacaaacaaaatattgaatgaaaaagacaaatcacaggaatacatacaaaatgatgccgtttatgtaaaggtgaaaaactcacaaaaccaaatattttgttcatggacacgtacatgcacagtaaaatgacgttgaaaaatattgaataatccaaaaactaaaataacagttactcctgccagggagaaagaggattggaatgtgtctgaatggacaatgctctgtctgttttatttactcatttttaaatttttttagagatgaagtctcactctgtcacccaggctagagtgcagtggcacaatcacagctcactacagcctggaactcctgagctcaggcagtccttccacctcagtcccctgattagctgggactacaggcacagctaatgctctatttcttaagcttggtcgtttattattctatgggcctatgaacacattacctatagtccttcatatatatgaaatatttcataataaatgcaaatcaaggcaaaaattaaaaggggaatgaaaagccaagtatatagaagaaaatttggtgttggtctaaaacataacacatttagtttaaatatataaatcttgtgaccttcactctgaactacatacagaattggctgggccttgcaaagtcgcagtcctttgaaagaatggttgaatatttgaaaaatgggaaaaaaaataaagttagtgtttcatttttaataggtaagaagtactttattataatgaatctgtcagtttaacctctgtacataaagaacacaagattaccaaaacaatgcagttatctctagaatatgttctgtgaaacaccagacgttaaaggttctgtaatcaaatgtgttcaggaatgcaagatactataccccctcttagaaattcgtaagtaagcacctaatatggctgctagattattttttccatcttgaaaattcaaatattaatgaaaacttaagtattctctatgagagatgtagagaatctataaatgaaatctcttgcaaggtctaagaaaatcctgcctcaaatgacatctctgacaatgttcatctcattctttggctcttttccctctgctcacacctcaaatgttagtgttccttaggctcattcctgttcctcttctcttctcaatctctttgcctcctctgcaatctataatctgatcatttcaagatctctctattcagacctcacttttccagactcatactctaaattcatattggaatttctcaagctatgatcccacagacatttcagatttaacacatccaaaccagactctgttacttcacatcctaaaataacttggtctctggattctccattttcatcatggtgtcaccatcccgtcttgttttcaaattagaaatcactttaattggactcttgcatcttcttgcatttattttgccatttttcaggagtgttccttggcttgaggattagagatctttattttctctaatcctttgtcacatcttagtttccagctttattttgtcttaattgggtcattctgtcaccaatatttcccatatgcagttcataattcacatagtattaacataagcatctaatcatgttatttcttgttaacatgaaataacatgttctgttatttttcctgtatggagagcctccagagactctatacaggtgatagacagcctgttaaggtgatagacagtacaacgtgttaggttatacatggagggccaacagatttttggtagtttagaaaaggaagtgaccatcagatgttgatagaagatgatatttctgagtattaacgtatgagtaggagtttgcttgttggatgaagagggacagagacagctacggagtcttgacaatttctctttgtctctgcttctgaactagtggtgaattgactacagaaagtcttgattatcataagggccagtactgtcataaccctaaactttgtgtacaatagaaaaagatgattctgcaaaagaaactatcatcagagcaaacagacaacctacaaaatgggagaaattttttgcaatctttctatctgacaaaggtctaatatccagagtctacaaggaacttaaacaaatttacaagaaaaaaaaacaaacaaccccattaaaaagtgagcaaagggctgggcacagtggctcactcctgtaatctcagcactttcagaggccaaggcgggtggatcacctgaagtcaggagttcaagaccagcctggccaacatggcgaaaccccgttactactaaaaatacaaaagttagctgggtgtggtgatggacgcctgtaattccagctacttaggaggctgaggcaggagaatcacttgaacccaagtggcagaggttgcagtgagccgagattgtgccactgcactccatcctgggtaatagagggagactccataaaaaaaaaaaaaaaaaaaaaaaaaaaaggatgggcaaaggacatgaacagacatttctcaaaagaagacttttatgtggccaaaaaccatgtaaaaaacagttcaacatcactgatcattaagagaaatgcaaattaaaaccacaatgagataccactatctcatgccagtcagagtggcaattattaaaacatcaagaaacaacagatgctagtgaggctgtggagaaataggaacgcttttacactcttgttgggaatgtaacttagttcaaccattgtggaagacagtggggtgattcctcaaagacctagaaccagaaaagccatttgacccagcaatcccattactgggtatatacccaaataaatataaattattctttataaagatagaggcatgcatatgttcattgcagcaccattcacaatagcaaagacatgaagtcaactcaaatgcccatcaatgacagactggataaagaatatatggtacatatacaacatggaatagtatgaagccataacaaggaatgagatcatgtcccttgcagggacatgaatggagctggaagccattatcctcagcaaactaatgcaggaacagaaaagcaaataccacatgttctcacttataagtgggagctgaacaatgaggacatggacacagggagggaaacaacccatactgggtcctgtcagagggtggagggggaggagggagagcatcagcagaaatagctaacacatgctgggcttaatacctaggtgatgggttagtaggtatagtaaacccccatggcacacatttacctatgtaacaaacctgcatgtcctgcacatgtaccccagagcttaaaataaaatgaaaagagtgaaaaaaaaaagaaaaaaagaaaaggaggtccttctaggtgaggtattactaaaaggcaactgaaagaaaaaaatgtttctctatacttaacaacaattctggacaccaaatgtgtgggtttttttttttttttttcatgccgaccgattctccaacaccagctgggtctcctacaacccaccacagttctgacactagctacccagagttagcatagaccacacaggtaaaggcctcagtcccataagactgccctacacttcaaatgccagttgcagacctgggcctctcataatttctgaccaaccaacaataaatcaggggtgcttactacttcctccttgggttggataatttgctagaatggctcacagcacttaggaaagcagtttattcaccattgctggtttactataaaggatacaactcaggaacagccaaatggaagagatccaagggcaaaggatgtgagaacgggagctgtatgccctctccgggtccaccacccttccaaaactttcacatgttcaccaacccagaagttcttggaacaccattgtttagaggttttatggtggttccattatgtaggtagaatttattaaattaatggccattgatggttgagctcaatcttgagcttctctcctatccccttacactggggatgaggctgaaagttccaatactgtaatcatataattggttcccctggcaactagccctatcctgaagctgtctagggagcccatccactaggcattcatattactctggagattccaagggtcttcgaagtgcttgtatcagaaactagggactaaggccaaatattgtaacaaaagatgttcctatcgtccctatcactcaggaaattacaagaattttaggacctctctgccggggatttgggacaaagatcaaatgtttatttcttagtacatcacaatatcatagtatttcttcctctgggttgatggagacagaaccaaagtgcaagtcttatacaaacaggatttcaggccacacacacttccagtctctacccaccccgtagcccagtacctgtgtgtaggggacacgctacacagccataatctgcagctctgattctgactcagcagtcctgtacattatatggccccatgattgccccaaccaaatgtagcatttgcagctcttatcttttgcagctatactatctttggcagccagcctgctgctaggtgacagtttcttttaaactactgagatgagccaatcagtccacacaaacggaagttttcataggcctgtgacagactccaactaaaatgtggttttctacccaaagctttagtgtcctgcctcatatgaagtacaatttcattacaaaatagcaagtgcttcccaagccaatgaggtatctctaagtacatggacctgaggcatgaacatgctgatgtgaatgtaaacaacagtcacacataaaataaattagtcagtgtgcaatgaatttagaaaatacttcaaataaatagaggagactaaatggtatttattcatttaatcaacaaatatttattgagcctctattatatgacaagtattaccctagatactgggaaaacagagattaaccaaataaacaacactcatgaaatttgcagtctaacgggaggagaaagacaacaaatttaaaaatctctactatgttgagtggtgataaatgttgtggataaaagtaaagttggatgagaagactagggaatgccctggtgaggcatgagggcatttgatacttgatataggatcgtcaagagagaaccctctcagaaggagctgttgtcaggggaagatcaaaagccctgagctggaaatgtgtgtgtgtgtgtgtgtgtgtgtgtgtgtgtgtgtgtgtgtgtgtgtacctggcccacttctttttccttcagtgtttgtctttttataacctgtttaaaagagcaatttttatattaaaaaattaaccctttgaattccgtttatgttaccaacgttttcccctcacttcgtcagtgtatttctcttttgtgatatttttgcaccagtggaatttttatcagaattgcactcaaatatattaattatttgggaagaatttacatgtctgcagccttcagtcctcccatttagtaaaactggtggtccagtcttaaaagtaccacaaatttttattaagatgattctttggtttttaaaactatttttgctgttattatgaatgtaggattattttggtccattgtactttctaactgttgtttctggttataagagaaaattattagtttttggagcacagtggctcacacctgtaatcccagcacttgagaaaactatttgtttttaaatgtgtatgtttttgtcttcagccattttctcaaactcccttattcgaatagtttttagtttctttccactatttataaacaattatttcatctaggtataatatttctgtttcttctcatcattaacattttatgtcttaattctactcactaaaatttccaggaccttaatgaaaaaaagataacagtatactcacttttcttgttcttgattttaataacatatatcgctagtatttttacaattacttgtgatgccagcctttagtttaacagaggtgttttttattaggtgttaaagaaatatccctttagtcatagatttaaacattcttatttggagtggatattgcattttgtcaaattctttttggtatctgtcaaagaaatgataagttgtttcttctttaaatggctaataccataaattaatttaatatagggtctattaagatgttttttagagaacactttttccacaggctggtccatgaaaaaaattgggggtggggagattattgtctgatcaaatcatttggaggaaatgctacatagtatattttcttcttaaagattaattagctcattagcatattaaagatactgagaagtccagtagtgaagaattccattaactttgttaaacccttcatttccaaatattacctgtcccccctccttcatatagcattaattagcaccccccttgacttgggttcaatctaacacacttgagaagtgttatattaatagctttccttgtattaaatcatccttgcactcctggaatagaaacgccttggccatagagtgtggctttttaatctagtgctaagagtgctaagttggttaggttttaactgaggatttttgagtctgtaattataagtgggatgtactgtcatttttttgtctctgccttcttttggctgtttctcttattttagtatcagtgtgattctggattggtgatatgtattgggaaatgatccatatttttctgggctctggaacaatttatgctgcatggggaattatcataggattttattttcttaatttgaaatattttctacaaaatagccaaaagagaaatgaacccaaacacagtgctaactggttgtcagtgagcttgtaattaaatcccctgttagctttattttctttactgatgaggcttcaaatgtcttcatttttcctctttgtgggtaaacatgattgctctttgccccaaacggttgacggttcagacagcctaccctgcttagaagcaatcattccttgctcttgtcactccagttcactgcagaacagggaagcatcaaagttaggtcagggaagcaggaaatgatagaatcccaggcaggagaaccaaacttctccatgagtatgttgtccctgaggctgggaacaaagtggggtgacaagtatgaaggcctggagggagggaggcaacagaggcaggtgaattgtgaggtctagaatcccaagaagaggtgaaagagtatcgatcctgttttaaaaacactttctttgaggccgtgttgagagaatgttggacatttacagtctgtaagtggcgacagggagtgctaggtccacttctgaggccagttcctccccaagtcacagaactctttattcagagagatgcaatattattatagtcaaaatacttcacacaattaagggtttaggcatgaaaacacataaaaatggatatataccttctttcctggtatggggattactccacattaaaaagcgaaataccttagccatgcattccagcctcatagcaggcgcccagctacgtgctaggtatttgtgactaagtacctggtgtttgttcaataaagatgtgtgttgtctttccttgtttttatgcaatagatgtgtttctaaaaggtggggcatacattaaaattagagaattaatctttttttccaggtgaggtatatatatatatatacacacacacatatatccttaggcactaaatgtgtctgctttttaatccatctttagttagtgtttctgagcatgggaactttttaacctctccttatcctggtactcttaaggtataataatggtctcagatacttcaatatattaaattttaaaaattattatattaatattcaaaataatttttttctaaataagttgataagttgccagtgttctctatttgtttcttcatatgctgggtagcttgcacctccatctaaaatacaaattgcacataatacaattctttaaccaaatatcggttgtgtttcttttgagacaaaaaaagaaactgctaagattacatgtctctgagttattctctgtaatgtgatgaatgccaaaaacaagaaacatgtatagtagaggaaaatagtggtgatcaacagcaaagtggttccctccactcttctccatacccctctcctcccttcagagaagcacattcatctaagtgaattgttgggaaaaacttatagtccattcctccatccaaggatccctctacgttgcaggcatatgtttaacatgcttattaaatgctattttttctctagtaatgtacagcaaaaaataataataatcaaaggaaaattttggtggtctgttgcaatatgaaatcaggatttgaatgcctgtaatattataaccaacactgagttctttgaagttccttgattctcacaaagctaaaaatcattccttacccttgattagagaaaaatctgattttcctgttgcattgccttcttgaaagagatgatatgagaaagtgccacgatgaattgttgaggttaaatcagacgatattgattttgtgtctaacccagctgtactttctcagttccaacacctcacagggaaatacatacaggccattccacagtaaagacacctgcgacttgataaaattattgggtaaggacatgggaaaacatatttttctccatagccatgcttgcatgtttttctttttttatttttattttacccctttccctgcctcccctttttgtgattgtatagaatatgccaacattttgaagggacatcttgggaggtgaggccggttccctgggaccagattctctgttatcgtgagccaggtcaccatttcattcccctctgttaacagtgactgtagagtccacagatgttccacagtgggtggaggtaataatctgaggcctgtacccaagccaccttgtggcccaggttttaaagttgtgtgggaagcaaagaaacagatgcaaaagacaacatgcagaaagagtgaacacaactcagtgactaatggggcatgcaggatcaggaagagctaaaagtcaaatgacattcatatcctggagaatgaggtgcccccatcaagttaatccattaattaatcaaacattcaggacctggagccattcactctctaacatattctttggctgtattaatatggccattaattcctgaacaacaagcagaaggaaacagtacttaaaaccatggttgagagcacttagtttttcttctctgacgatgtgcaaatcggcagttgcacttttaaaaaaagcctttcatataaatctgggcaccatcctgaatgcatcagtcctattaacagcatgctagttttggagaattgctacaaacccagcctgaggtgaatggcagctgctcttctctggtcagggctacttaaagaagtggcaagtccaaagccatttagaaactgaaaagtggccttctgataaataaaacgacacttctgaagctgaacatcaaggaaagaactttgtgctgacggagaactacagaagctttcctatgggaggctggcatgcagatgtcaccgtggggctttgttgattatgaaactggaagccatagcagtaagtgggtgcatgggggcaaccaaaagcaggaggatggccttgcctgtgtctgtaagacgacttgagacagtagctgccaacagagtcccttaggtgtgtgctttataactgcaggatggtacaaatgacactcttaattttctgagagtttgctttgcagtgaagatttaagacactgagattaatttagttaaattgatatttcccctcgtgatttcagggattaaacagtaaataagcctcttgatgttgatctatctcctggggggtccaataaattacagaaacacttcttgccattttttggagcttcctcttcatttattctccttcctgtggcatactgtgtatggccaggcctttgctacaatttgttatttataaaaagtacagagcacatttcaatcctaccagataaagtcagaattctaactgagctatgggtcaactaactagaaaaaggagtttaagacccaactctggatgtaaatgatgacatggctgtctgtgagggatatggtttggatttgtatccctgcccaaatctcatgtcaaattgtaatccccagtgttggaggaggggcctggtgggaggtgaccggatcatggggacagacatcccccttgctgttctccggacagtgagtgagttctcacaagacctggttgtttaaaagtgtgtagcccctcttccttttctctcttcttcctgctctggccacgtaagacgtgcctccttcctctttgacttccgtcatgattgtgggtttcctgaggcctctccagcaatgcttcctgggtagcccatggaaccatgagccaactaaacctcttttctttgtggattggccagtctcaagtagttctttgtagcaatgtgagaatggactaatacagtaaggcttatggaacttcaagtggtgatttgggttggattcctgacatctccttggtatatccttagacacatcatggagtctctctgttacatcatcgttgagaaaacatcagcaaaatgcttaaaatgttttgggaaaaaatatgttggcagagtcttacttaggaacaggctgcattccaaaattattcaactaatttggacaaattgagtgtctactatgtgccagacatagttgacttcgatagatggggcacctttgccaaaaagtagccctttactggcaagtttccagttagtttgcaagtcagctgtgtataaattgggatacattttcctaaagagacaaattttgaaacagtggttagattctcaggccaattctcagaagctaagttaattcataatgaagtggaactcaacttctaatggaattctcaaacctaactaccatttacacagtgatttttaaccctttgctgcataccacattataacgacctaggaattctttaaaaatttaataaataccaaccaggtgcggtggctcacgcctgtaatcccagcactttgggaggccgaggcgggcagatcacgaggtcaggagatggagaccatcctggctaacacagtgaaaccccgcctctactaacaatacaaaaaattagccgggcgtggtggcgggcgcctgtagtcccagctactcggcaggctgaggcaggagaatggtgtgaacttgggagacggagcttgcagtgagcagagatggcgccactgcgctccagcctgggtgacagagcgagactccatctcaaaaaaaaaaaaaaaaaaaaaaaaaaaaaaaaaaaattaataaataccaatacgcaaactatgcccacaggacaataaaatcagaatctattaccggtagcaatggtggaaaatggaccttaggaaagaatagagaggaatgggaagcaatgcctctagggagatcagggctgtgactggggggtaggggctagggttccagggggtgcagggtgtcgtctggggtattgtggcattggtggctagaataacaagagaagatgcttctggaaatagtagtaagactgtgggcttgtaccctataggagatttttgtcttttgacagtaaatcatttttcaggagtacgaagatgatgcagggggctagaatattcagctccagaagcacaaggattggtgcttcaatgataaggagggagctgataagaacctaagtggtcaacatcactcatcagtttccttttgtccagttcatgaggaatgaaagaagctaccttcaatccaccttcttattttggggtgaagctttcacaaaatgccatgcctcatgtttctcctctgaatatgtagttctttttatcatcttggcctgattacaggcccttaagactcagcagagctaaggggaagggaagggaattgagggaaccaccaagagagctccaaaaacaagagttggcaggtaattctgttcatccacgcctgctctgtaacagctttcagagttcagctcttactttcagtcacttccttgcaacccttgcagtcagaatttcagggttcagaaacataggcctaaagtgttatcaccaagtggtgaaagcaagtttgctgggtggaggatctcctcggctattttgccaagttcttctcatttttatagctgggcatgaagatttccttttttgacattctgtgactgttacaatgtaggaaaatctgtggagatacaacattttcatatttcaagtagctgctctcaaataagggacattttctaagttctactgtttatttttccctggaattttctaggatatattgctttagctctgttttctagttttctctttatgacattttggcttctcccggtcaacaaaaatactgcactggaagaattccagagacatgtgaaagttatctgtcctgcttgagggaaagaaattactactgttttcttccctctgagagagatggcccttaaaagtgttggaatgtatctcttttcttgacattttctgatgttcctgattctgttttcctggtgagggcaaaataaattattgtgaaaaaaaggaggtgaggccctggttctacaggtttctagaggttctggtatggggagggtgtgcacagaagaacttcttccaggtactgatttactgtaagcaacaaacaaacagatcttttttctcatagattgccagccgaactgtgtagcaacactatggaaaagaccccaaccacttccacaaaagaaattcttcccttcactaagtgaggagtttaactcagttagaaaatctggatggacctcaaaggaagaattttctcctttcaaactcaacccatttcaataatagagagaaaaacagatttttttagaactgaaattccttagcaaaatttaattggaatagcattctaccttaatgggcaatcagcttatttagtaggtgagactccattaattttgactgttcaaggagatttcataaccaagtcacttaacttcaagtattctgatggagcagatagctccccatttaggaattttcttgtgctggagtaggaaaatgagagcagcgcctgccttgatatgttgatgatacccttttatttggcaaaggtattattcataaggtagtcaattaatgtcagcctattggaaaaatgacaggctttaaagcttcctctttagattagagactctaaaattctaaatgcctgcagatccatatgtcagttgttgcttctgacctttcctaattgaattagcctccttctagtgagcctgatttaaaaaaaaaattaatagatggggttgctgggggtatcacttagattttcctattgaaaataaatattcccctccaagtagtttatttccggaagtattaagccaaagtcagaaaagtggcaatagcttcaaatagacaggaagtggctgtaaaattagcctttcttaacgagaaggtcagagctgctttatatttttttaaatttcacttttatgtgtggctcattgcttaggctctggctgaggctcatttaacaatgatcccagcagtactggagccctaagcaacaagacttggagacctatcctccttccctggggtgaaatcacctcaaatcattcttaaatacttgttaaaattttcagttgcttaaaagttattttaaatgtaaattttcattttgaaagcaaacagggactcagaaatgatttttgtcagaataagtttgggtctgattctctcctataaccatttctaaaggaaaagcttggtttaattcaatctccagttaagtcaaaaacctaaagaaaagtgagtcatttcatttctcctctaaaaactaaagtgtcaggaaaagttcttttatctgtttcaatatattccaacctgttacaatctttttttttttaagtcataggaaagtatacgaagaaggaatggctgataggtgaactaaaagagaaagccaaaatctttaattacctttatcaggttagcagggaaacaggcacctatgccttaggtagaaaaaggtgattagcattcagaatactgaagcccacatcaattcagaaagggcatgattttaagataagttgaagggtaagttaggaagaagcaactttttaaagcttaagtataaaactaggatgagatcaaagatggattgttaataagagtcaaggattagttggaagtaaagtccctaatcatacccagagtatttaatagactcaattgtgttaaagaagatcttagaggtcatccaatccaacttcgatctttgattgcaaggaacagatgtctcctccagctgacactagccaaagatgggaatttatttaaaagttatataaactaagcactgaaagaaagccaggcctaaagaatgaaggagattccagaatttgatctttatttcaggacctatctctttatttctttgaaaattaatgcatatatcctcagcagcagcataaagctattgtttgtacatgactatggctgaagttctaaaatgtgttttgaatcgtgaaattacaagcacagatctacaaaatggtgatagtgtctctatactaaaaatacaactgcacattttcaatttctctaaaatgaactatgttactatgtaattgcaattacagaactgctgttaatgatgaaagaccctacgcctacctagaccaatcctcttattctaccattagagaaactgtagcctgggaagaagtgatatgttcataatttcccagaggtttaatagtagagccagtagaagaatggagatcctttgatggctgctgtatcagacatgatgctttgtgccacactgggagcagtggccaagaaagaacttagttaagaacctgagttctctagtgtcagactgtcctcgggcaagtactttatacctttctgagccttcatctgtgtaatatggatattagtactccccacaggatggggttgttgtgaggattaaatgagacaacaaatgcacagttattaacacaatgtctagtacatataaatgctctaaaaacaatacaattatcaatcgaaaaatattagctttttgctgcataacaaacaatcctgaaactgaatgatttgcaaaaatatttttatttcctacttataaatctgtgatcagctataactctgctaagcttagctggccgtggctccagttttgggctcatgttgatcccataagtttcctcatcccagatccaggctgaaggaacaacccctaccttggatgcgttgttctcacgataaagaggaatataagaaatgggaaccatgtgatgcttcttaaaacctctactggacaccatcacaatgttgactcttcgcatattatacctatcacagcaagtcatttggccaagcccaaattcaatgaggcagaaaagttaattgcatccacaggcaagctatgttctaggatggaatgaacaatataatctagcacagaaaggttgcgagaaaatctgtggtcactgacacaagaagcttgaataatctgaaactataaactgcataggccatctgtagtagctcaagtcttcaaaattatggactgttaagaaaaaaatcagagatctagggaaggcaacaaagttattttgggtacagacaggataagagggtatataataccattccttctcccagaagcttcaataggtagaggatatactgatttagaggtcatttatttcagtgtttccaaacctgaaaggtatttcaaagggttcatattcttaaagcagcagtggtatgtgtttgcatttccactaattttttaaaagctcaatacatttaacgtttatgtaaaaactgtttccattataaatggaacacatcgagaacccccaggtgtatatggaggaagcctacttggtggtaagtggagattagatgactttgctcgtgatttgtaacttagtttataacacagatgagcactactaggtgcatcctttatcatcatacatttttaattgttttattcttagtcatatgttgtttacatttcattctcaactctgaattaatgaggaatttaatgaaggagaaaaacataattctgtcaattttcttctggatacttttccccagatccataaatttctttcatctgagaaaataactatatgaaacatcaagatatctctaatatttcaaaacataatgtaaaaaagaaaaataaattggtgctatttatgcatcctgtctgtaaccaacaatctattgcagaaataaacactgatgatgctttgaggtctgtaccaggttaggggatagatcagaatgactgtgttcctattatttttacacctcagtacaacatcacaggccattccttctgcctgaaaagccctccttcttctccctcctctgcctaatgttccactcagccttaatccacagctcagctcttacctcctgttggagaagaaattatcctcttcaattccctcagctatatttgttgctctttccccagtattcccatagcacatgcaggggaattacctcctgaatagccttggttttgaaaatagtcactgagtctgtctttctgagttaaccctgagttgagattggggcaatttggttttccagtgcccagcaacatgcctcgcacctagaaagtactcaacacatctttcttgagtggatgagagtaaacggaattgcagcttgatatataagattgaaaactggagaggacattgaagagagcatttcaggaagaagaaaagcacacagaagtaaggagtaagaagacagaggctgagatgcgcaagtttaaggagcaataaatgagcccatgtgactagaccaaagagtttaagaaaagaagtcctggaaaaagcagtggggagtttaggtgtgttgaggagggtctcaggggacacacattgtcttggtctgccctggccatcgtatgtcaaaatatcacatagcttaaacagcagaagtttattttctcacagtttcgggagcttgaagtctaagatcagggtaccagcattacaggtttctggtgaaggctctcttcctgtcttgtagatggctgccctctggctgtgttttcacatggtgggaagagggagcactctggtgtctcttgcttttcttataaggaaactaatcttatccccgtaatctcatcatatgacaactcaccctgctaatctcatgtaaagctaattatctcccaaaggccccatcaccaaatacaaaataccaccagactggggactacggcctcaacatatgaatttgggggaacaaaattcagcccatagcatccacccatattgagtggttaaggaaccggccactgataaatgaagtggaccctaaagattgctatcatccttctgccattattggggttccattgttcagttaagaaagtgaatgaaatctagaaaatcagcatttccaattaaaaaggcgttaaagcctaaggacatgaagaaaataaccttttaatttctgagatgaatgaacaaagaaatttttctaagtggtatcttctatttctatagcagccataaatcataccattgggagctgtaccattttacttttaaatgtacgtttttgaaaagaacacagtcgtttcttattattctccttttgtacaatttcattgcattcataaccagtcaaagggtcctgatgattctccggcagaaaaactatttgttatattcacagtccaagtgcctactgattagcacaggtattttgcattagctgattgggatagaagtacagtcttcctctaagctttactgctttctccattttccattttttgttatttttcaggcctggattcctttcacttggttcattctcttaagaattaccagccacagaatgatgtttttatttatttgaaaagtttatgtccatttgcaaatgattcaagacaagactgagaattccactgcctgatttgcagaaagttgttgctgcctgaaaatgtgctgggcatgtcctgttgatagatagtacaaataaacagtgttaatacaatgggcaaacttcagagcatttccatagctcccgactattgaatgatatacaaaaatatatgacttggggacagctgaaattgtttccacactttgagctctgcttccattagactggttcacaatattagattgaatcccaaggtgctactgataatcatcagctgcttttcttgccaagaatctttgtttaaatgtattctttcattatccatgtgcttttgaaaaaaatgagggaaagaatgcttttaattgaataatctgtattctgtcaggtatttcttctccgtaggaaggtatctgaaaacttactttactttgctgtttttatttatcctgccagtgtagtatattgatgagagaactgaggtccaatagtgttaaaacaagacatgaaatattgattaattcttcttttaaattctctttttacccctgagtataacagatttcagaagctgctgccaataccatgctctccaataaacctccattattggaaggggggtcttgatacccttcaggctttgataaatgattattatgcttttgaaatgttagctttgagtgcctgaggcttgactttcatcagttcaagaaagaaacagtagaactgaagctgcaaagtttgagccaaaggcccccaaaggaaccatttcatgaaaggagttaaccatagatactgtggcttctgaactcgttgtccttgtcccacctgatactttttctgcattcctaattgtacattcccccattgcaggctaagacttgccctttgggtctaggcctactgagtttgctgatttctaaggttaaaaagtaagataatgggtttagatggacttgtaaagaagggagaaggaagtacgatgcttggttggatgaagaaaatcaggggactgtgaatgagcagagtaggaactggagattataggaatctggctgtttagggtcaaggacgccctcagagcaatcaccctaaggcaagaataggccctggggagtcaagaaatccactgccctcttaggacccagatgagcttggaacagaggggaatctgataaaatgtataagagaactgcacaggacagccactgcacaacaaagagttatcctgtccaaaatgttaatagtgctgagattgataaactctaatctagagaaagtgctacaattttttgccatcaaagtatgaatttcttgagttcagaacccaactcattgagctattggtattcaataattagcagagcatcctgtgaatagataataaatccaacataatccagttctcttttgaaaagtagccatttccatttcctcagttcctcccctgaaattatctgaaagggaaatgtcactcagttagaaggctccagcttgccagataatgggaggaaagtgcttcacgatatctttccagaaatgagaagaggacagagtgtgctcagaaacagaggtacaggcaaatgaaggttgctgacagccaaaaacactgagactggtaaacatcatgatagctgaacagacgaggaatccctgtatccatgtgatggcctttcgacatgaaggaataggggtaaacatcaagggtaaagtagcttatattttattgaaataaactagatgaaaggtcgtatcttaaatgatatgtcttcaagcatgtgctacatcaaggtcttgacggcatcattttcccaagagatatgccagtaaatttaagtagtttccaagttgtaagtatcttgattaccaaggagcagcagggtgcagagcctgaccggtaaaatcaaaggattgatggcttcctcttcacacgcctgcctttattttcccctgcatggcccattattctgctgcattaatttaagctttcctattgcacagaattaggggcttaaattctcttatcatccctgtgggaatcttgattgtttatttgtggatgagaataattgtttttattgatccccaaatgtggaaggtaaaaaaaaatgctatggttgatggccagctgatacatagttagtgctgcgtgcatgagtgacaaattatgagacagtatttggccccagaggatatcctttaagaatttttaaggcatttgatagttatcactttaaggcatttgatagttatcactaagtctttccaagctggaaatcataaacaatttcacatacatcaggtaaagtctttttgttgtagttttcattgaaacttaaaggtctagttgtgtgtaatttataatttctcatttccagtatgctcacacagcaactcggtagagtttggaaatggtacggctacaagacattctggagccagtgctatcaggccagtgagttcctctagggacccagattactaggcatttatttggaagaattcctggattcatccagaagttgtcattattccactgcaagcatcattgtatggacattagctccaaatagttagagaaaagaactactttgctagccctagcttgtactgtgggtaggaaaccccctgccatttaacatcccaaatatatcagaggcatcagggaaaggaactgcaactgtcaattaagtgctgtttgtaggacagggcacttgggcagtatgagcctcccccatctgaatcaaatgcaacacatcttgtttaaagagctattgagctaattagcatggcatgtctacacagaaataaaacaaatcaggttaggtcctaaaggaatcaagtatcagaaatgtggtaaagtttccttattaggtggtaagatggcaagatccttgaccagatgccaaaccctgaaattcttgatcttcttttcctgtgctaaagagaacatagatatatagagaagccactaatgaccattgtatcttctttattctttgagggctgtgttctggaagcttactgttgaaccttcagaaacgactgtgtgggctagaccagaatgagtcaggagagcttgcttgtttcacagaataagtgtccatatgtcacaaagaggatcttcctctttttcctggggatatcatattatctttgtctttgataattagcacctctgtgaagggaccacatcaaagggaggatgatttttcctaattatgatttttttttctcactcaaattcacctttacccttagcactatggttcagttatggccttggccttcgtcagccattgcaacaccttccatgagtggcagtgtaaaggagggaatcatggagttctccccacaaaagttttgtgactattgtcactaccattgcaaggtaaaaactttatacccagcttatatttttatatataccccatacatttagtgtcatgcccatcacacaagggagcatgaaatgtgatctgacgtattcacatgtttgctcattacaacatccaatatgcatagagcatggtaccgcacagtggttaaaacttaattacagactgttgagggtgatgatcacagaatcatagttcaaccatctcattttagacacaaggaaaataagacccagagaggctaaataagtggccaaagcctcatgttcgagtagcagcagagctgcaatatgaaaccagatatcctcactccaattctaactgcactctgtgttgactctgaaacacatggctgtgctttgttgcactgtattgtgatcaattgttttaacatgtgtgcctccctcactagaccatgtactcttaagaaaatattcatcaccagcttcctagcacagtcagtggcacataataggatcccaataaatgttggttgaaaaagtgaataaatgagtaaatacatgagacctgattttttcctcatcatatagaaacaaacaaatgccgtaacttttagtgatctctatgagtgcttggtcagcctgataatgaagaatagacaagatagggagtgaaaggtagaaaaaaatagtatgagaaagaagagaaaaaaaaagaatatacaattccataggaataataaccagacaaattcagtacatagacaaaatatttagattcaatttgggagcattttgtcaagactcttgcctcttctgatctcttctcattttcaaataagggctttttaagcagatggtgctttaagcaattcccatcattgctgctcctcctcaaaccccagaatgcaggattgactgcaggttaagttgtctaaaaggcaaagttgttcgttactgtagctcacttccctgagatacgtcttcccattcattttgcatctattgctgccccatgttgctgctactgtcacagaggaaagtgcatgtaactcactgtgatctagtttctgggatattttccatacaccagaagatgcgaaggaatggctacttaggtagtaacatttcagactcagtgacaagtatgcagagaggatgtatatgggctgagtctgtgtatccttgtaaatcacccaaagtcaatgcaagtaaaggctaaaaaatccaattatcaacccccactgtgagtttgtgtttttcctgaaatgctggcacattgtaagtaatttgacactaagtagtgcctgttaaaaagaagcagcagcagcagcagcaaaggattcaaggctcctaattatagcacactgatggcttggtactgggatgtgcatcaacaatattgagcatcagtagggagcaagtactggctggagggctgtatccagagagcggttatcagtatctaagtgtcagtttgaactggctgtgctcctgtaggccaagaagtctatatggaagatagaccatttaatctttttcagaggtgttgctacacagctatcaaacaaattggggtgctccaaatgcccccgtggagagttttaaggagatggacagtcatctcttttgaatggattgagtcacactggctaaagacaaatatggagatccagcttttcatttaacattcctttgaaccatttggaacttggcagatgcccaatcagcacttcatccaagtacatcaccaccttccccttcagttcctgcatttcccagctcttctttgaacataccaaccatacttccatatttgtgattttgtccttgcccttccctcttcctgaaataccttttcctcatgtggtccaagtggcttcttcctccttgaccctcccctctgtctttttcagatctttgttcccatgatcaaagaaggctttcctagccaaactttataatatagctacctccaaatccaacccactggccttcacaaagacagaaggtttggttgttttgatcgttgttgtatccccagcctccataacagtgattaccatgtagcttgttcaatggaaatacaatgaagaagttggtaacataggtcttaaaaaggaaaagtcttgtcttataatgcctggaaagcagttaagaaatcttttcagatgctttcatttcaagttattcacatacactgcatgtaagttacacttagaaacccaagcagccttcaagaaagtagtaatatgtccagttaagcaagatagcactattatcattcagttcccatctgggctccaagcaactttaagagaatctttcctctgatagacaggactaatttgtgtcttatggaaaattaaataaattatttttcacctgaagggataagattatttgacttcagatatttgctatatggcttctcttccacacaacatagctttgaggcttaaggtagtaagagcaagagcattcctataaattattcagagataattcaaaacaagtgtgcatctttgacatattgtcaagtttctcaactctttttcctgataacaagtgctatgtttttgatgaaatgttgctcgtttctcacacaccttattgttctgtgtgtgtgttctgtgttttgttctgtttgttattgtttgttttcatttccctcagagtccagtctggctcatatctcagcacagggtggtttaccttccttctggccatggacgcctgttatggcattcacgtctacgggatgataaatgacacctactgcaagtaagatcacaagaaattatttttatgcagctccaattcggagatcttgtcaaaatatcacaattcattttaataccataaatctgagaaacagataaagcaacaattatttcccagtgttctttgctgacatgacattttattgtcagtgcgtcaagttgtgacttctaggggtgagaaaaagaaaaatatttaccagtctaatgtcaaatgtcaggaggaacacttttcccttaatcagtggcatagcagggacttttggcttgaaaatacagaagaagtttagtggttgtgtaatttgcaaaagcaagtttgtcatttctgctgctctgatggcttgatggatagctatctactcaatggttagttagatttgatcatgaaggacaaaatgtcctgcagcctcagagaaactgacagcttaacaagaattcctggaaattatacttcactagtaagtgagtaatctgccagatccttatttaaaatgagtgtgtttacccacagtatatccttgctggtgggatagtttctaattagataatgaaacaaaccctccatgcttcatcaggataatggaatctatttccctaccaacaattggcacaatataattcacagactgttttaatcataatgtcaaaatggtaactctcagccacagtcttcatgaacaaatatttcttccctaactataagcataatggagctcagatgagccaatatcttactgtgaaaaatcacagtttcttcaagttctgcaagaggctatctaaagtttcttcaattatacaccatttccttttcaaaagatagccatatgtttgaatgtaattggcatgatatataaattttatttgatctattaaaccactaaaaacttggtacatcttcctaaaagctttcatacatataatagcttttaactgagttcatggacaagaatcatgtatgggtttgtgagtaaatgcatttactgggcacataatggattcttgtaaatgagtgcttcattcttcatctcaatctttctctccttttctttttttttcttttctaggacagaagggtatagaaaagtcccctaccattattatgaacaaggaagagatgagtgtgatgaatattttcttcatgaacatgccccatatgggggtcataggtttatcactgaaaagaaagtgtttgctaaatgggccaagaagcacaggataatatttacacatccaaactggacattgtcttgataatggttttcctgatcttgccgcatcacttaatgtgatccccatactgcaactgtgatgctgatgatgctaatggagatgatggtaatgataaagacaacaacaatgattatcaagttcctgtacactctcagatgtggatggtgactctgctagtaatttaaacttggcatttcatggaggatggttgtgctcatgatgttctttctggaggttcaacactacgtaccgcactttataatttaactggaattgagatgaaggccagtgacatgacaactgtgacctaagaaatgggaagattatctttcaagatagctgcctagaattgttcaacagtgagtaacttccagaagccaaaagagtttggcttcatgaggcaaggtgattgactcaatggcttgttgaatctcagcagttccgccatcttgaagaatgattgattgtcaaacactgacccaagaactgctatcagggtgcaagtatcttactacttagcctaaggatgggaaaatatctcttcctaatataccatctttctacagtatttcctacagctaaagcctcaggccattgcctaattaacaatgaagatttcatggacatcctacacttcaggattacttgactatctcaaacacataaatcaaaatgggccaagtagcaaatcttgatgaatttccactcttaccatccattcttactaccaacagtataactgaacatgtgattagaatgatctatattaatgtttagttatttttggttgagtgctaaatatttcagaaggctacttaacatgtaagataccaacttcaacactgtaataacatatactgtgaaaacattcctaaaaagtaaccaaagggtttgctaactctgcttcaacatccaacaacacaaaactatatgatttttaaaatcatgaaatagagacagcaaagcatatttttacatcaatttgtatcctatcatacttcataatatatatttgtatattcaaatttctattttataggcccaaggtgtgtttctccaaacattacattctcattgccaagtgccagctgttacacatggagaggaaatgattccttatattaaacctgaccagagctttttgccttctagggatttatttttcccatagtgtatcagttgttatgccacaataacaacaataataatgttcttaatgtccaaagtgctttgtcatttagagtcctttaacatctgttataccatgtgatgcccttgaacaccccattgggctattgtctgtgtattctgctctctttagcagatgatctgtaatttggtcattgttctgttatattccagattgctctacttgctaatatttgtatagaatagaatttatgtaaactagtaaccagttgatctctgtgccaaatacattatatcaggattacacaaaaagtatcacaaaggatggtcttggccatatgctagggcccctgtgaaaataagtagttttgagaagtttttctatatacgtatatatacacgtgtggttctatttaggtggggaaaaaatgaaaaagcagggacaacaggaggaaatgaaggcagagaaatatagtttcctttcctaggattgagacaattctatttttcatatactcgttgctcattaaatagtaaagggttgatttgctgcaagagtagctgagaattcaaaaacatccttgcagaatgattcaaaagacaaaagccaggctcaacttatagaatgttttggaaactggaagtaatgatacatttcacttcagaagcacttgtaggtctttactagtgctaagtattatggtgagctatcattaaagtgtgccatcttggataaaggccttttgcctactctcttctgcaattttgacacctcaatattcacacccataaacattactaagccccagttctatcgttggaaggagttgttattcttttgttgttcccttatgcaatttttaattctatgaatgttaagtttttttgagctaatgatagatagaaatgcccactcaaagaaaaataaacagagacaaatgttaaaattgccatacagactgtttttccccctgttgtttcactttaaaataaaaagaaatccttgattaatc

SEQ ID NO: 6 - DNA, 16102 bp, Homo sapiens
  misc_feature (1)..(16102): DNA nucleotide sequence of the entire ZNF660 genomic locus including 5000-bp upstream sequence.
ggagaggagcttgggggggggcttcattggtgaagtcctgcttgctagggaacgcccttttctcgctgcggccctggcgtgtgtcactggatggcgagggccccactgcattggtctccatgtgctctgccttctcaatgtccaaggcctcaaacttttcaatcacctgggacctcctgtggttgggggtgctggggctgggaggggagagcggcgggggcagctgctgttcttcggccttcaagtcgtgtttggtcttctccagagagaagtagctgctctccccccggactttgcggccacagtccatgcggtcgctactcatggcgctctcctcttctttgctctccagcccaggttcccgcagggagctggcagcaggaggctggctctggctgggactctgagctggactcagactgctgccatctggctggtccttggtcctcatttcttcctgccagagtgtggacttggtggtggggactttctcagcactggggatgctgctgctgctgctgctgctggtggtaacagccaccttggcaggcccaggctcctgcggtgtggggggctccactttccatttcttcttctgattctgcttgttggtccggggatagaccatgagcatctccagccacccactgacgatctccttggtctccgcccggatgaaatgctccttctcaggcgtcagaatacacagggagaacctctggcccgtgcggccctccccatccaccacatctgtgcactggttcatgttgatggtgccctgaggaagggtcgtgggcatctcatccagggcgtagcgcaagaggccatgctcgtaaaggatgaagaactgtcgctgccatttcggagaccggtgcactgagttgtcaaagtcggtcccatctggagccaggaggagccaaccgccataaatgggttttgcctgcgtcaggtcctcgtcgttgaggagatgcgactcgcggggctggaagcagttctgacacttgctcttgttgaagatgttggcctggaatttcctgcacgggttctccttggctgccgacatggtcggcgcggcggcggcggcggcgcaggcccggccggcctggcgctcccggcgggctaggggctcagcgcggccgccgccgcatccctcgccggccctgccacaggccctgaccggcctccttccctgcgggcggctcgctgcacgcgccgaggctcctgagccgcccgggcctcacagcgcgcgcgacgcccagctcccgcccgcaccgccgccgcccagccgccgtgggcccaaggacgcggcctcgggcccgctgcttcccgctgcggcccgcctctcaagctccggtcgccgccgtcccggctcgtccgcgccgccacagctgccctcagcgccccgcggccgctgcaaatgaccaattcttaagatatgtgaaaaaccattcagttgtagcaaacatcatacaccagagactttgtttgacatcagataaatcacacgggttagagaactttttggtttttagaggtcaaggaatcattcatcatgagcttccatattttgcacatatttctgaaaaatattcctgaagtggaaaagttttgttatacaacacatagttcctggtacatgagggaacccacgaaaaaaggtatcagtaaacagtgttacagaacttccaatttaatatatatatgttttagtcaaacagaattcaaacccaaggacagtttaggtggtggtcagacccagtgaaggtgctgggagtggtatacttactcacttacctcttaaacatgcaatgaaaatattctacagccaaacccttatcataaactccagccctggtcattcagcttctaaatgcagtaggaaatgtcaagagatggtggatgttaacaagttattgagtactgtcccatgttgggagacagttctgtcaagatgttgacctttttctggagtactacagagcgtgcattcctgaaaacctctaggggttagggacaggttgtgaatttgtcaattgtgaatacgcacatggtggcactataaaaagaattgaaagtaaatcccctatccctaacatcaggtcatgctctgccctgatggggaccagtagaatttgccacagctggatacagggaaggtgttaacgattacagctggctccacaagcacctagtggtgctagtacttgatccaggataggacattttagatttattattcaccaaatcataacagtcctccactaatatatgcacagggtcactttacccaggtggatgccaagtagggtgagatgcagactcccttttaaggcatgtgagtgctttacatgaaaacacaataggagagcaatgtatgacggcccacctttctggcctgtgggtattcctgaaatgatgcctggttaagacttgtcaactgactaaaattacaatgttttttccccttagatggcctagtccacaaacttaaaaagacctgaccaactagacgttgatttcatttacccaaatgagttagaatttctttggcagatagatgtcataataaagattgaaattgctgagtatttaggcaattatgacacacaaaaaaacaccctgatttctgagcagtgacattatacttgactgaatgaatagatttttgtaggaaaaagtatgcttgtggataagggcaatagaagctggatacaggcaggctggaatctatttttaacatatattctagtgacccttacgttctctaaaatttgagaattactggactagaatattaaggagtaatcattcctccctgggaccagatgtagggttagcagcttgaatcagaatgaatggccccacccacccaaatgaaagagtaggtgaaagggaagactaagtaagttaaagatcacagctcccttaatgtacatgaatattcgtgtgtgtgtgtgtgtgtgtgtgtgtgtgtgtgtgtgtgactgagtttcactcttgtcttccaggctggagtacaatggcgtgatcttggctcacttcaatctccagctcccgagttcaagcgattctcctgcctcagactcctgagtagctgggattacaggcgcctgccaccatgcccagctaatttttgtaatatttagtagagacggggtttcaccatgttggccaggctggtttcgaactcctgacctcaggtgatccacccgcctcagcctcccaaagtggtgggattacaggcgtgagccaccacacccagcctattctttttaagtttcttgatgtagtggcagtagtcttgtgctcttcaggagagtgtcccgagttctacgtcccacatcaactgagggtgtgaacttgtggaggacttttgtctgaatctctttttcaatctctatacaatgtggcggagttgtgccacctacatgagccaatggagaagaaagctcctggtatactttaagtactcaacaatattaaatactgaatatttgtcaattgacgaagtacttcaaaagcttgattctcagactccttcttagataaatcattccctagattgtctcatcctgtcctgacaacttccaaatttatgtctttagctgtgatctcttcacggaagtccagactcctattccaactgcctgtttggcatttcatcttggatgtttaattggcatctttaacacatccaaaacaaaactattaatccctctccctaaacctgttcctttcaagctactcgatttctaaaagaccatcccatgctagttgctcagatcaataaccatggagtcatcagtaaccaacattcaattcattagcaaatcatgcaggccatgccttcaaaatatatgcagaaccatttctcactacctgcatcacttctaagcctgtccaagccactatcagtcctcatctggaatattgtaatggcctcttaatctccctgattctactcttacccaccttcagaccgttctcaacaagacagccaaagcaaactaaaaatataagtcaaagagcaaaattcatgcaaggtttatgttagaatggctaaggacagacagcaaagaattcacagaatttatagtaacaggcttcttggcttctttcatgtctcatagctaacaagtctttgaatatgtggtaagggaaaaaaagttagatcatgtcgttcctctgtccccaagccctccagctgttatgcagagcaaatccaaagcccttatcatagtctacaagatcctaaatgtgcacctctccaccccactcctgattaaagaattttgctcctaatggcccactatgggaatactctttccccagatagccacatgcttcaattgcccacttcctgtctctgccctccctgtcatctgtaaaatagtcccaccactatctccctctctccccttactccctctctccccttactgctacgttctacatatttatttatcattgtctccttgacttgaatgtaaactcaatggggcagagagttcattttcttcactactgtatccgcagcgcctggaacagtgagtgacatagtaggcacccaaaacgtcttttcatatgctgccaataaaccatagctgatcctggctttgaggctgaatgacccagatctgtggaaggaaagatgacctctctgctcagcaaccggagctgggggtgtaactttagggagtctcagcctgaggctggcagcctggccacccagatgctcggtctctttccgccctaaccaagccccctgcccagcttccaccacttccagggccctcctcacattggctgaagtcgccaagcccttccatccaatgatagggcaaagcccggaagggaggcagggccagagcgtcggccgaccgcgcggggcttctgaggggcggggggactccagcccgcgggcacagagatgtggaaacctcacgaagcctagaagggccggagggacaggctgggagttagctgggagttgctgacgcagttccttctgcgctttgttcaagatgtgggtctggcgctttcggtgaggggtgctctacagtctggcgtggggggtcgggccgggttctgggagcgtgtgggagacgcaagccaggaggccagggctcctctgcggctgcccgctgctgagatgggcgcggcagccaaggggtcgttgtgggcctcccctttctctcgttcagtgctgcccctttgtcttgggtccagtctctgactcctcgtagctgctcgcttggaccaggctggccgtggtgacagcactgtgtcgtccccgctcctaggcagtgggccttccgggtagtagcggtcgagtcccgcctaggctctcaggactccacagcccctgagtatttgactcaaatcaccagtccaatatccctcccgttaccagtgaggaacctggggcccagagaagaggacggagtcttgcccaaggttactcattcattcattgattcattcaacaaatatttattgagcactaacccagtagtgtgctaggtcctggggttatggttgtgtacaggacagaactaaattctagtaggggagaaatgaaacaaacttcaagggttagaagcagagcctggggatctggagggggaaacacaaaacatatttgaggcttagtaatcctaagaaatgggtaaacagaaaaaaggaacattctttttctagtgctcttttaaagacttgtttctttctgtcttcctaaagacacttgactcagcaaagttctccctctcatcccccttgtgcagactttctgtggaaagctggattgcaaggaagttctccactgcattgtattttgcagttagatgagaatatggaagcttttagatatcaatggagcaggtgaaaaggggaggctgtggtgtgatggaattaggatttcctgaagacacagaaggctttttaatcactcactagctataggaccttgggcaagtcgttcaatccctgggagcttcattccctcatctttacactggaaatgatccttcttactgcccacagttctataggaagggaagttacccaaagatgggacactgccctgagtgtccacttggaattcagggctcagagaactcagtcatttatatctgtttacagtgactcaagaccctcttaggaacttcttcactgaactcaaggaggagatcaggcaagatctgtgctgtgcagatcctttggattgaggctgctgtgcacaggaatatgggtgagtcattccattctctcctgggcaggtgaggcctagattgtgaagttagtctgggcacaggaatcctgcttgtgggcaccagggttgaaagggagcttctctcagtggtatttatcaaacaggagaaaagcactgaagtgggcagggggcctctggaccttgaggagtagagttttgtttcagatgggaataagggtgatgtagtagaactcaaaattgggtgtcatgggacttggatttgagtcccagctttcctctaagttccaagttttccttctgtacatttggatataagactggatagactgggaggttccttccagctctgacatactgagagtctctgaatagtgggaccaggtcaatctcttagggaatttagtccctgggatgactctgttgagacagaattgccaagaatgcaaatacaccattatggtgtttcccagataatatgaagcacaaaaaggacaaacatgtagaggagggatggtagtagtgatgtgtggatttggctctcagcatccctatgtgcactccaggtgttagaatcttaaacttgtttaatttaccatttcaaatcaaacaatgctgactgagccctctctgtgtcagacaccatgtggtatctacaggcaaatctcatgggaactgctctctgagggcatagagcttaatgtatatatttgaggatggacacagacatacacacaagcaattccagtataaggcaaactctattttatagatttgttatggcattttttggaatacagaaatttttatgtgtcagatatatcagctttttcacatggtgttagcctttcccttgaggcttaggcctttcttctaattctttttttttcttgcaatgtttacatttcacttatccatcccttgaatttattttcaggtatttcctcttattccttactccactgcacctaatcaataaccaagaaccatgtaaccattgcttagagggacttgaacaggcagatgatgctggtgaattaaaggaagacagcctccaagtaaagcctctctctctctctctcaataggattctaccctttatgtatttttcacagcctgaaatggatggtggtcctaggattagaacacttacctaccagtctcagagatttgtgggttagagatctgcagggccttatcagtcctcatacattcactggctgtctgagattttgcttttctgtacagttgcctagatacccctagtgtcctactggcctgtggcctcatgtttccctccaaacttctccagccaagaccctacttccttagtacctaggaattcttccaggatttctgagggcatttcctatccaatcagacagaagggagcaaataggtttctttttgatcaaactctcctcatttggccctctttgatctcctgtctggtcctgcttcctcctcagctcctccatcaccaccctgggctttcttacagtgcatcgctgtgcatttctctttctccctacctgcccctttgtgttaggctattcttgtgttgctgtaaagaaataccagccgggcgcggtggcttacgcctgcaatcccagcactttgggaggctgaggtgggcggatcacctgaggttgggagtttgagaccagcctgaccaacatggagaaaccccatctctactaaaaatacaaaaaattagctgggcgtggtggcacatgcctgtaatcccagctactcgggaggctgaggcagaggaatcacttgaacctgggaggcagaggttgtagtgagctgagatcacgccattgcactctagcctaggcaacaagagcgaaacttcgtctcagaaaaaaagaaagaaagaaagaaagaaatacctgtgactgggttaattgtaaagaaaagagtttaaattgactcactgttctgcaggctgtacaggaagcacggtgccagcatctgttcagtttctggggaggcctcaggaagcttttactcatggtggaaagtgaagtaggaggaggcagagcatggtgagagtaggagcaagagcaaggcagagggataccacacacttttaaacaacatgatctcacgagaactcactatcacaaggacagaaccaagaggatgacgataagccattcatgagaaatctacccccacgatccagtcacctcccaacaggcccacctccaacatagaagattacatttcaatgtgagatttggaaggaacatctaaatgatatcacttttctaacccaaatccctttctcagtaagcttatctgtttttttatttttttaatgtatttatttattttgagacaagttctcactgtctcccaggctggagtgtggcggcatgatcatagctcactgcagcctcgacctccctcagcctcccaagtagctgggaccacaggcatatgccaccacacctggctcactttttaaaatatttttacccaggctgatcaaacacctgggctcaggcagtcctcccacctcaccctaccaaagtgctgggattataggagtgagccaccgtgcccgaccctcagtaagtttatacattttcatgactccctctgtcctctctgtcttatcattctcaaatttgccttcgtgatatattcctcttcaccttgtctaaaatgtttctgtgtgtccccatcttgcttagtgacactaccattcttggtattcagacatggatctgatgaccttggattgtttccttcagtccatcctctgtattcaaaggaatatggatgtgtgcgttatacatctggatgcgttcctgaaaatagctagacttcattgttctctgttctctcatcttggattagggtcttgctatcttattcatttgttcattcattcaacaaacgtttattgggtacctacaacgtgccagaccctccagtgttcacctgtaccgcatgactagtgttgtctcctaattcatttcccttcctcttttctttttaaccccctctaatccatctgggctaatcttcctaaagagttcttatcctaatttcacttttgggtaggataatgcaaaatttattgtccaaacggggatactgttgtgagttaagggagccattattaaatatgatgctgggatagtaggcttaaactagcactattctgggaaaaccaggatatatgattgccctacttgacatctcttggattctttactttctgtttccctcaatttactccccatgtgttatcccagctgcctctctcctctgttttccatttcattaagctgagagaaacgtgaatgttctgggaggtggtagtggaggaactatgggaactaggggaagtgcatggtaatgcttgaaaaactgtattgttaagtgagaaaaagaaggaaaataacaagagtggagaatagcaaggtacaaaaaagaatatagaatggagaaagaaaattaaggatagatttcactcttctgtttagaactggtttccctttgaccatcagtttatatccatatttttcatcttgtaatttcagtattctggttggaatcacttcaggcagcttgattctttcttcatttgttaattccaacaacaaaaaatgttgagcgcttaccatgtgcctgggactgtggtagtgctaggaatacagggtaagcaggacggacaaaatccctgcctacatgaagtttatataatattatgatctcccatttattttcatgtataccaaccctgtgcctttttttttttttttttttttttgagaaaacactgcttattctccagggctcagcctaaattctgcctttttaaaatgcttttctccatcattccatgccttagtaattgctccctccctcccctagtcctcttcatctcctgcttgcatacattgtaaatttgaatttgctctcttattgtttttccatactactccattgtaagctctttaagggaagtatgatatttcatgcttgtattagtgtgcttgggttaccataacaaaatgccataaactgagtggcttaaacaacagaaacttattttctcacagttctgcagcctagaagtgtgagatccatgtgcctcgccattttggtttctggtagggggctctcatcctgtcttgtagctggccatcttcttactatgtattctcatagcctttatgtgtatgtgtgtggagagagggagagcatgtaagagaactttcttgtgtttctttttataaggacatgaattctgttggatcagggcccacccttatgacctcatttaaccttaattatctccttagaggccccatctccaaatacagtcacattgggggttagagctttaacatacaaatgttagggggacacaaacattcagtccatgacaatgcttctttaaattttccctgtgttagacccagaacagggatatatacagagtagggtgctcattagttatgagtttaagaaatgtatgaagaaaagagaagttccagagaagatgagaaattgaaaagaaattcagaaaaaactatcaactttctcacagaactttgaaggtgagttcacttgctctactgctctgcattgcagtcccctggctttgcactgttttctccacctgcttcatccttaatgattaggagaggtagcagcagctggatgtgagtgagcccaggaccctggcaagaatccaccctccctcaccattctctcttcctacccttcttatcttgggcatgagtttgtgtgtatgtgcctgtgtatggaatcagtggccacccgcatttctgagatgtgaactcgaatatgtgcagttatctttttgccagtctcgagtgccaccatttgctatcttccttctccagaaagtgtggctccatttatcagaaagctgtgggacatggaaattggtcaaacttttttttttgagacaaagtcttgctctgttgcccaggctgaagtgcagtggcataatcagggctcactgcagcctggacctcctgggctcaagcaatcctctcacctcagcctcctgagtaattgggactacaggtgcacaccaccatgcctagctaatttttaaattctttgtagagatgtagtctccctgtcttaccctggctggtctcaaacttttgggcccaagtgatcctcccgcctcagccttgcaaagtgctgagattatagacatgtgccaccatgctcagcccatcaaacttttttgaatagcaacaagcaatactgcacaacagttgcactccttctgacccaattaactcatttgtggaacttttgtcctaggaatatattttaataggaagaaaattttgtgtgtataaagagattatgatagcattattgatagtagttaacttcaaggaacaacagaaatgtccaacactagcaaaatggtaggtaaattagaaggaattcaatgatcatatgaagattaaatagcaatgtggaaaaatgtgcattaaaaaattaagtggaggctgggcgcagtggttcacgcctgtaatcccagcactttgggaggccgaggcaggtggatcacctgaggtcaggagttcaaggccagcctggccaacatggcgaaataccatttctacttaaaaaatacaaaaactagccaggcgtggtggcagacgcctgtaatcccagctactcaggagggtgaggcagggagaattgcttgaatccaggaggcggaggttgtagtgagtggagattgaaccactgcactctagcctgggcaacagagcgagcctccgtctcaaaaaacaaaaaaaaatttgtgaggcagggattagggagatgttggtcaaaggatacaaaaattctgttaggaggaataatttcaggaaatctattgtattacatggtaattatagttaatatcaacatatttagacttgaaaagtgctaagagagattttaaatgttcttaccatgaaaaaataataagtatgtgaagtaatggatatgttaattagcttgatttacctgttccatgtgtaaacatttataaaaacatgttgtatgccataaatatatatacttttttatcaactaaaaaataaatgaaatgaactgcaagaagtaggatgcaaaataatatctaccatatttaattgtctaacaaaatacatatgggcaagtctataaaggagcatagtcatgtgttagtatcatgtagttatctttttgctttcttttacatcccaactccctctaaggtctgccatggttacctgtatgtccagagtttcacgtcaaaccagttgggaaattcctccttattctgatgtttggtttcatgtattggcacctcttggttatgctgcccctactctgacgcttttgccatccttagatactttactattatgccatgcaagatcctatcagagtttcatctgccatgctttaactaaccttctttcccaatttagcctctcagactcaccccttaagtagtctcagtctgtcagagtgacagcatggtgaaaagcagacagactacacttgcatataaaactggatccaactggctgggcgcggtggctaacgcctgtaatcctagcactttgggaggccgaggcaggtggatcacgaggtcaggagatcgagaccatcctggctaacacagtgaaacctcgtctctactaaaaatacaaaaaattagccaggcgtggtggcgggcgcctgtagccccagccactcgggaggctgaagcaggagaacggcgtgaacctgggaggcggagcttgcagtgagccgagatcgtgccactgcactccagcctgggcgacagagtgagactccgtctcagaaaaaaaaaaaaaactgggtccaactataggccagcccctatgaagtaggctatgatgtgactaggctcaatattgaaagaactgtgtcaccacttaacaagatagggtttacctgcaaggatgtagactggggtctagtacctggaccttgagcaaaagatgaaatcctactcacaacctaagacagaatcctagttgctattctataataccattttgagcaccttttacatactggccacagtatcactagtactaggggaataggttagcaagaactaaaagccaaactgaactaaagtttagtcatctttcagttcactttttctaggaccagattatagttgagcctgccattaggagttagatggctctgagctgggtgcggtggctcatgcctataatcccagcactttgggaggctgaggcaggtggatcacctgaggtcaggagttcaagaccagcctggccaacatagtgaaaccccatctctgctaaaaatacaaaaaattagctgggcgtggtggcaggcgcctgtaatcccagttactagggaggctgaggcaggagaatcgcttgaacctgggaagcggaggttgcagtgagtcaagatcgtgccattgcactccatctcaaaaaaaaaaaaaaaaaaagcaacgagttagatggctccaattcagggagtagaggatgaggcaggaaggaactagggtagattttatacgattcattgcttattctgatgctggacctgctgggctccccttagcccctggctttccataagcctttacattggcctctatgtttaacttcatttttgtcatctttttgatctgttcccctgcccttgaacacttaacccttccatatggctaccacatcttgtccgtggatagatctccttcctctggtacagagaataggtgacatgtgcaatttctgtttctcctgtcagatggtgaaactgggactgaggaggagttaattccaaagcatcattcctgaaaaatcagaatcatacatactttcaagagaattccacagagacattgcccaggaagtcaaaatttagaaggctcctctgaagggaaagagaagactagagaggacactggtatgttccaagcaggagaaaatgaggagaaagacaagaaatttcaaacataagacagttaaagacaataaagtactcacagaagggagtgaccaagaatctgaaaaagacaatagtcagtgctgtgaccctgcaacaaatgagagagttcaggctgaaaagagacagtatgtatgtactgagtgtgggaaagcctttagtcagagtgcaaacctcacagtacatgagcgaatccacacgggagagaaaccctataagtgtaaggagtgtggaaaagctttcagtcatagctctaaccttgttgttcatcggagaatccacactggactgaagccctatacatgcagtgaatgtgggaaatctttcagtggaaagtcacatcttattcggcaccagggaatccacagtggggagaaaacttatgaatgtaaagagtgtgggaaagcctttagtcggagttcgggccttatatcacatcacagagttcacaccggagagaagccctattcttgtattgagtgtgggaaagcctttagccgtagttcaaaccttactcaacatcagcgaatgcacagaggaaaaaaagtttacaaatgtaaggagtgtgggaaaacatgtggttctaatacaaagattatggaccatcagagaattcacactggagagaagccttatgaatgtgatgagtgtggaaaaactttcatcttaaggaaaactcttaatgaacaccagagacttcatcgtagagagaaaccttacaaatgtaatgagtgtgggaaggcttttacttctaatcgaaaccttgttgatcatcagagagttcacactggagagaaaccctataaatgtaatgaatgtgggaaaaccttcaggcagacttctcaagttattctacacttgagaacccacactaaggagaaaccctataaatgtagtgagtgtgggaaagcctatcggtatagttcacagcttattcaacaccagaggaaacataatgaggagaaagaaacctcataaataacaaatattgtgggtagtagggctgactgctgcttttctaaaaagtagttctttagtatcaactttaattctacttctaagaatcatactctacttctaagaaaataattagaagtagacaaagattaatgaaagggatgttcatgacagcatcatatacgactgaaagaagaaaactagattttcaacattacagggttgaaatgaatgatgagctatccatatgatggttctgcagccattgcaaacatttttaaagacaatttaatgccatggggaaatgattggataagacggaagataatgacatacaatccaaaatttaaaaaaatatttttgcataggaaaaattgagaaggaagtaaaccaaaatgttaacagtgatcatctctgggcgataggattataggtgatttctattttcttctgtatacttttctatgctttctagattatctacatgagaatatactaattttatatgcaagaaaaaaagcacagtattttttaaatgcaatgaagacgtgcttattttcactcagcagtgttatgaaaggcacgtagtatatagagcccaaagccctgggattgcaccctgacactggcatttagcagcagtggaaccgcgagcaagtcccttccttttagagcgtgtttcctgttaagtaaaatcataaacaccgatcctttgtcctttttagttttaagacaagctgactttagagttgtcaacaaaatatataataacactgttaggttaaaagaacacagcaaaaattcactgaaccctcctttcccacagttctggaaggatctgcagatgatggagaactacctaggcttcatcttttcaacatatgtctacacaaccag

SEQ ID NO: 7 - DNA, 4949 bp, Homo sapiens
  misc_feature (1)..(4949): AOX1 transcript nucleotide sequence
cgccccactcggcgggtcggtgccgccgggtcccaggtgcccgctacttcccagaacctccgcctcccgctccgggccctcgaaccagcgcggacaccacaatggaccgggcgtccgagctgctcttctacgtgaacggccgcaaggtgatagaaaaaaatgtcgatcctgaaacaatgctgttgccttatttgaggaagaagcttcgactcacaggaactaagtatggctgtggaggaggaggctgtggtgcttgtacagtgatgatatcacgatacaaccccatcaccaagaggataaggcatcacccagccaatgcctgtctgattcccatctgttctctgtatggtgctgccgtcaccacagtagaaggcataggaagcacccacaccagaattcatcctgttcaggagaggattgccaagtgtcatggcacccagtgtggcttctgcacacctgggatggtgatgtccatctacacgctgctcaggaaccacccagagcccactctggatcagttaactgatgcccttggtggtaacctgtgccgttgcactggatacaggcccataattgatgcatgcaagactttctgtaaaacttcgggctgctgtcaaagtaaagaaaatggggtttgctgtttggatcaaggaatcaatggattgccagaatttgaggaaggaagtaagacaagtccaaaactcttcgcagaagaggagtttctgccattggatccaacccaggaactgatatttcctcctgagctaatgataatggctgagaaacagtcgcaaaggaccagggtgtttggcagtgagagaatgatgtggttttcccccgtgaccctgaaggaactgctggaatttaaattcaagtatccccaggctcctgttatcatgggaaacacctctgtggggcctgaagtgaaatttaaaggcgtctttcacccagttataatttctcctgatagaattgaagaactgagtgttgtaaaccatgcatataatggactcacccttggtgctggtctcagcctagcccaggtgaaggacattttggctgatgtagtccagaagcttccagaggagaagacacagatgtaccatgctctcctgaagcatttgggaactctggctgggtcccagatcaggaacatggcttctttagggggacacatcattagcaggcatccagattcagatctgaatcccatcctggctgtgggtaactgtaccctcaacttgctatcaaaagaaggaaaacgacagattcctttaaatgagcaattcctcagcaagtgccctaatgcagatcttaagcctcaagaaatcttggtctcagtgaacatcccctactcaaggaagtgggaatttgtgtcagccttccgacaagcccagcgacaggagaatgcgctagcgatagtcaattcaggaatgagagtcttttttggagaaggggatggcattattagagagttatgcatctcatatggaggcgttggtccagccaccatctgtgccaagaattcctgccagaaactcattggaaggcactggaacgaacagatgctggatatagcctgcaggcttattctgaatgaagtctcccttttgggctcggcgccaggtgggaaagtggagttcaagaggactctcatcatcagcttcctcttcaagttctacctggaagtgtcacagattttgaaaaagatggatccagttcactatcctagccttgcagacaagtatgaaagtgctttagaagatcttcattccaaacatcactgcagtacattaaagtaccagaatataggcccaaagcagcatcctgaagacccaattggccaccccatcatgcatctgtctggtgtgaagcatgccacgggggaggccatctactgtgatgacatgcctctggtggaccaggaacttttcttgacttttgtgactagttcaagagctcatgctaagattgtgtctattgatctgtcagaagctctcagcatgcccggtgtggtggacatcatgacagcagaacatcttagtgacgtcaactccttctgcttttttactgaagctgagaaatttctggcgacagataaggtgttctgtgtgggtcagcttgtctgtgctgtgcttgccgattctgaggttcaggcaaagcgagctgctaagcgagtgaagattgtctatcaagacttggagccgctgatactaacaattgaggaaagtatacaacacaactcctccttcaagccagaaaggaaactggaatatggaaatgttgacgaagcatttaaagtggttgatcaaattcttgaaggtgaaatacatatgggaggtcaagaacatttttatatggaaacccaaagcatgcttgtcgttcccaagggagaggatcaagaaatggatgtctacgtgtccacacagtttcccaaatatatacaggacattgttgcctcaaccttgaagctcccagctaacaaggtcatgtgccatgtaaggcgtgttggtggagcgtttggagggaaggtgttaaaaaccggaatcattgcagccgtcactgcatttgccgcaaacaaacatggccgtgcagttcgctgtgttctggaacgaggagaagacatgttaataactggaggccgccatccttaccttggaaagtacaaagctggattcatgaacgatggcagaatcttggccctggacatggagcattacagcaatgcaggcgcctccttggatgaatcattattcgtgatagaaatgggacttctgaaaatggacaatgcttacaagtttcccaatctccgctgccggggttgggcatgcagaaccaaccttccatccaacacagcttttcgtgggtttggctttcctcaggcagcgctgatcaccgaatcttgtatcacggaagttgcagccaaatgtggactatcccctgagaaggtgcgaatcataaacatgtacaaggaaattgatcaaacaccctacaaacaagagatcaatgccaagaacctaatccagtgttggagagaatgtatggccatgtcttcctactccttgaggaaagttgctgtggaaaagttcaatgcagagaattattggaagaagaaaggactggccatggtccccctgaagtttcctgttggccttggctcacgtgctgctggtcaggctgctgccttggttcacatttatcttgatggctctgtgctggtcactcacggtggaattgaaatggggcagggggtccacactaaaatgattcaggtggtcagccgtgaattaagaatgccaatgtcgaatgtccacctgcgtggaacaagcacagaaactgtccctaatgcaaatatctctggaggttctgtggtggcagatctcaacggtttggcagtaaaggatgcctgtcaaactcttctaaaacgcctcgaacccatcatcagcaagaatcctaaaggaacttggaaagactgggcacagactgcttttgatgaaagcattaacctttcagctgttggatacttcagaggttatgagtcagacatgaactgggagaaaggcgaaggccagcccttcgaatactttgtttatggagctgcctgttccgaggttgaaatagactgcctgacgggggatcataagaacatcagaacagacattgtcatggatgttggctgcagtataaatccagccattgacataggccagattgaaggtgcatttattcaaggcatgggactttatacaatagaggaactgaattattctccccagggcattctgcacactcgtggtccagaccaatataaaatccctgccatctgtgacatgcccacggagttgcacattgctttgttgcctccttctcaaaactcaaatactctttattcatctaagggtctgggagagtcgggggtgttcctggggtgttccgtgtttttcgctatccatgacgcagtgagtgcagcacgacaggagagaggcctgcatggacccttgacccttaatagtccactgaccccggagaagattaggatggcctgtgaagacaagttcacaaaaatgattccgagagatgaacctggatcctacgttccttggaatgtacccatctgaatcaaatgcaaacttctggagaaaacagagtgcctcttcccagatggcaatctgtcctatctctgtgctggaagatgctagatctgaaagacagagtttccacagttcagaaatcatcccacagtgttgcttttctatggagctgatttaaagtattccatttagatttgatagatatgcttaagcaatctataaatcattttcaatgttataaacactaattggtttcctctagggtgatattcgtcattactctgtctcttcaatccatccagctaaatggaataggtgatgacttgcatgtgactcctacttggcttctatccaccaacagaaattataccatatagtgaaaggcaattttctaaataatttcattactaatatgaactgtgaagttgtcattttttcatttgtccttttctgctatcaccttcctcttgtcagaatgaatatagacactgtatctaagtgggaccaaagaaaaaatagcgaactttcaccaaagttttcatgaaaacccaaaagctttaaaagttactatcaagaaattgaaaggaaacccacagaataggataaaatatttgtaaatcatatatttgataaaagtcttgtaaccagatacataaagagctcttacaactcaataaaaggcaagtaatttaaaaataggcaaaagaattgctggatggtatggtagttctatttttagtttttaccctaactactctgacttgatcatttaacattctgtgtatgtaacaaaatatcacatgcataaatattatgtatcaataaaattttttaatgggcaaaaaaaaaaaaaaaaaa

SEQ ID NO: 8 - DNA, 1866 bp, Homo sapiens
  misc_feature (1)..(1866): C1orf114 transcript nucleotide sequence
cgctgttgccatggcagtgtggtcctggctgccgcggaggcaggtgccggggtctcctttgcctcaatgtgaagagcttagaaagaggaggagaggagaactcccccggccatctctgtgatcccagccgccgcattttacacagcatatttccttcacaaacagaaaatgaatgaaaataaagatactgattcaaagaaaagtgaagaatacgaagatgactttgaaaaggacctggagtggttaattaatgaaaatgaaaaaagtgatgccagcataatagagatggcttgtgagaaggaagagaatattaaccaagacttaaaagagaatgagacagtaatggagcacaccaaacggcattctgatcctgacaaatctttgcaggatgaggtctcaccaagaagaaatgacatcatttctgtaccaggtattcaacctttggatcccatatcagattcagatagtgaaaactctttccaggaatccaaactagaaagccagaaagacttggaggaggaagaggatgaggaagtaaggagatatattatggagaaaattgtacaagctaacaagcttctacagaatcaagaaccggtgaatgataaaagggagcgaaaacttaagttcaaggaccagttagttgatttggaagttcctccactagaagacactactacttttaaaaattattttgaaaacgaaaggaatatgtttgggaaactgtcacaattatgtatttccaatgattttggacaagaagatgtgctcctgtcacttactaatggaagctgtgaagaaaacaaggataggacaatactggtagagagagatggaaaatttgaacttctgaatttacaagacattgccagtcaggggtttttgcctcccattaataatgcaaatagtacagaaaatgaccctcagcagttgttacccagatcttccaactcctctgtcagtggcaccaagaaagaagattctacagcaaagattcatgctgtcactcactcatcaacaggagagccgctggcttatatcgctcagccaccactcaaccgcaagacttgtccaagctctgctgtcaactcagatcgaagtaaagggaatgggaaatctaatcacaggacacagtctgcacatatctcaccagtgacttcaacatactgtctttcccctcgacagaaagaactacaaaaacaactagaagaaaagagagaaaaactgaaaagagaggaagagcgacgaaaaatagaagaagagaaagaaaaaaagagagagaatgacatagtatttaaagcgtggttgcaaaagaaaagagagcaggtcttagaaatgaggagaattcagcgagcaaaggaaattgaagacatgaacagtagagaaaacagagatccacaacaagcttttcgattatggcttaaaaaaaagcacgaagagcagatgaaagaaagacagacagaagaactaagaaagcaagaggaatgtttattcttccttaaaggaacagaaggccgggaaagggcctttaaacaatggttaagaaggaaacggatggaaaaaatggcagagcaacaagctgtcagagagagaactagacagctccgactagaagctaagcgttctaaacagttacagcaccacctatatatgtcagaagccaaaccttttcgttttactgatcattataactgaaagtttctattaaatatttcagtgggcagctgctatcaaaattttggatatgatttcttagggtctgtgtactttggttgtattctaaattatggaaatggtatttatcttttattgacagtgaatttgtttttttaatactagaacaaaataaatttttttctcacagtg

SEQ ID NO: 9 - DNA, 2521 bp, Homo sapiens
  misc_feature (1)..(2521): GAS6 transcript nucleotide sequence
ccgagcgcttgaggtgccgcagccgccgccgccgccgccgccgcgatgtgaccttcagggccgccaggacgggatgaccggagcctccgccccgcggcgcccgcggctcgcctcggcctcccgggcgctctgaccgcgcgtccccggcccgccatggccccttcgctctcgcccgggcccgccgccctgcgccgcgcgccgcagctgctgctgctgctgctggccgcggagtgcgcgcttgccgcgctgttgccggcgcgcgaggccacgcagttcctgcggcccaggcagcgccgcgcctttcaggtcttcgaggaggccaagcagggccacctggagagggagtgcgtggaggagctgtgcagccgcgaggaggcgcgggaggtgttcgagaacgaccccgagacggattatttttacccaagatacttagactgcatcaacaagtatgggtctccgtacaccaaaaactcaggcttcgccacctgcgtgcaaaacctgcctgaccagtgcacgcccaacccctgcgataggaaggggacccaagcctgccaggacctcatgggcaacttcttctgcctgtgtaaagctggctgggggggccggctctgcgacaaagatgtcaacgaatgcagccaggagaacgggggctgcctccagatctgccacaacaagccgggtagcttccactgttcctgccacagcggcttcgagctctcctctgatggcaggacctgccaagacatagacgagtgcgcagactcggaggcctgcggggaggcgcgctgcaagaacctgcccggctcctactcctgcctctgtgacgagggctttgcgtacagctcccaggagaaggcttgccgagatgtggacgagtgtctgcagggccgctgtgagcaggtctgcgtgaactccccagggagctacacctgccactgtgacgggcgtgggggcctcaagctgtcccaggacatggacacctgtgaggacatcttgccgtgcgtgcccttcagcgtggccaagagtgtgaagtccttgtacctgggccggatgttcagtgggacccccgtgatccgactgcgcttcaagaggctgcagcccaccaggctggtagctgagtttgacttccggacctttgaccccgagggcatcctcctctttgccggaggccaccaggacagcacctggatcgtgctggccctgagagccggccggctggagctgcagctgcgctacaacggtgtcggccgtgtcaccagcagcggcccggtcatcaaccatggcatgtggcagacaatctctgttgaggagctggcgcggaatctggtcatcaaggtcaacagggatgctgtcatgaaaatcgcggtggccggggacttgttccaaccggagcgaggactgtatcatctgaacctgaccgtgggaggtattcccttccatgagaaggacctcgtgcagcctataaaccctcgtctggatggctgcatgaggagctggaactggctgaacggagaagacaccaccatccaggaaacggtgaaagtgaacacgaggatgcagtgcttctcggtgacggagagaggctctttctaccccgggagcggcttcgccttctacagcctggactacatgcggacccctctggacgtcgggactgaatcaacctgggaagtagaagtcgtggctcacatccgcccagccgcagacacaggcgtgctgtttgcgctctgggcccccgacctccgtgccgtgcctctctctgtggcactggtagactatcactccacgaagaaactcaagaagcagctggtggtcctggccgtggagcatacggccttggccctaatggagatcaaggtctgcgacggccaagagcacgtggtcaccgtctcgctgagggacggtgaggccaccctggaggtggacggcaccaggggccagagcgaggtgagcgccgcgcagctgcaggagaggctggccgtgctcgagaggcacctgcggagccccgtgctcacctttgctggcggcctgccagatgtgccggtgacttcagcgccagtcaccgcgttctaccgcggctgcatgacactggaggtcaaccggaggctgctggacctggacgaggcggcgtacaagcacagcgacatcacggcccactcctgcccccccgtggagcccgccgcagcctaggcccccacgggacgcggcaggcttctcagtctctgtccgagacagccgggaggagcctgggggctcctcaccacgtggggccatgctgagagctgggctttcctctgtgaccatcccggcctgtaacatatctgtaaatagtgagatggacttggggcctctgacgccgcgcactcagccgtgggcccgggcgcggggaggccggcgcagcgcagagcgggctcgaagaaaataattctctattatttttattaccaagcgcttctttctgactctaaaatatggaaaataaaatatttacagaaagctttgtaaaaaaaaaaaaaaaaaa

SEQ ID NO: 10 - DNA, 1893 bp, Homo sapiens
  misc_feature (1)..(1893): HAPLN3 transcript nucleotide sequence
cccgaaatcagactgctgccttggaccgggacagctcgcggcccccgagagctctagccgtcgaggagctgcctggggacgtttgccctggggccccagcctggcccgggtcaccctggcatgaggagatgggcctgttgctcctggtcccgttgctcctgctgcccggctcctacggactgcccttctacaacggcttctactactccaacagcgccaacgaccagaacctaggcaacggtcatggcaaagacctccttaatggagtgaagctggtggtggagacacccgaggagaccctgttcacctaccaaggggccagtgtgatcctgccctgccgctaccgctacgagccggccctggtctccccgcggcgtgtgcgtgtcaaatggtggaagctgtcggagaacggggccccagagaaggacgtgctggtggccatcgggctgaggcaccgctcctttggggactaccaaggccgcgtgcacctgcggcaggacaaagagcatgacgtctcgctggagatccaggatctgcggctggaggactatgggcgttaccgctgtgaggtcattgacgggctggaggatgaaagcggtctggtggagctggagctgcggggtgtggtctttccttaccagtcccccaacgggcgctaccagttcaacttccacgagggccagcaggtctgtgcagagcaggctgcggtggtggcctcctttgagcagctcttccgggcctgggaggagggcctggactggtgcaacgcgggctggctgcaggatgccacggtgcagtaccccatcatgttgccccggcagccctgcggtggcccgggcctggcacctggcgtgcgaagctacggcccccgccaccgccgcctgcaccgctatgatgtattctgcttcgctactgccctcaaggggcgggtgtactacctggagcaccctgagaagctgacgctgacagaggcaagggaggcctgccaggaagatgatgccacgatcgccaaggtgggacagctctttgccgcctggaagttccatggcctggaccgctgcgacgctggctggctggcagatggtagcgtccgctaccctgtggttcacccgcatcctaactgtgggcccccagagcctggggtccgaagctttggcttccccgacccgcagagccgcttgtacggtgtttactgctaccgccagcactaggacctggggccctcccctgccgcattccctcactggctgtgtatttattgagtggttcgttttcccttgtgggttggagccattttaactgtttttatacttctcaatttaaattttctttaaacatttttttactattttttgtaaagcaaacagaacccaatgcctccctttgctcctggatgccccactccaggaatcatgcttgctcccctgggccatttgcggttttgtgggcttctggagggttccccgccatccaggctggtctccctcccttaaggaggttggtgcccagagtgggcggtggcctgtctagaatgccgccgggagtccgggcatggtgggcacagttctccctgcccctcagcctgggggaagaagagggcctcgggggcctccggagctgggctttgggcctctcctgcccacctctacttctctgtgaagccgctgaccccagtctgcccactgaggggctagggctggaagccagttctaggcttccaggcgaaagctgagggaaggaagaaactcccctccccgttccccttcccctctcggttccaaagaatctgttttgttgtcatttgtttctcctgtttccctgtgtggggaggggccctcaggtgtgtgtactttggacaataaatggtgctatgactgccttccgccatcccca

SEQ ID NO: 11 - DNA, 3259 bp, Homo sapiens
  misc_feature (1)..(3259): ST6GALNAC3 transcript nucleotide sequence
ggggtctgtggcggcgcagcttacaccgcggtccccttatttggatctgcgggaatgtgggctggagaggtcctgccgtggtaccagcctccagcctgcccccaggactgcccctgacccaggcgcgcccgctgctcggtggcaggagggccggcggagcgccatggcctgcatcctgaagagaaagtctgtgattgctgtgagcttcatagcagcgttccttttcctgctggttgtgcgtcttgtaaatgaagtgaatttcccattgctactaaactgctttggacaacctggtacaaagtggataccattctcctacacatacaggcggccccttcgaactcactatggatacataaatgtgaagacacaagagcctttgcaactggactgtgacctttgtgccatagtgtcaaactcaggtcagatggttggccagaaggtgggaaatgagatagatcgatcctcctgcatttggagaatgaacaatgcccccaccaaaggttatgaagaagatgtcggccgcatgaccatgattcgagttgtgtcccataccagcgttcctcttttgctaaaaaaccctgattattttttcaaggaagcgaatactactatttatgttatttggggacctttccgcaatatgaggaaagatggcaatggcatcgtttacaacatgttgaaaaagacagttggtatctatccgaatgcccaaatatacgtgaccacagagaagcgcatgagttactgtgatggagtttttaagaaggaaactgggaaggacagagtccagtctggctcatatctcagcacagggtggtttaccttccttctggccatggacgcctgttatggcattcacgtctacgggatgataaatgacacctactgcaagacagaagggtatagaaaagtcccctaccattattatgaacaaggaagagatgagtgtgatgaatattttcttcatgaacatgccccatatgggggtcataggtttatcactgaaaagaaagtgtttgctaaatgggccaagaagcacaggataatatttacacatccaaactggacattgtcttgataatggttttcctgatcttgccgcatcacttaatgtgatccccatactgcaactgtgatgctgatgatgctaatggagatgatggtaatgataaagacaacaacaatgattatcaagttcctgtacactctcagatgtggatggtgactctgctagtaatttaaacttggcatttcatggaggatggttgtgctcatgatgttctttctggaggttcaacactacgtaccgcactttataatttaactggaattgagatgaaggccagtgacatgacaactgtgacctaagaaatgggaagattatctttcaagatagctgcctagaattgttcaacagtgagtaacttccagaagccaaaagagtttggcttcatgaggcaaggtgattgactcaatggcttgttgaatctcagcagttccgccatcttgaagaatgattgattgtcaaacactgacccaagaactgctatcagggtgcaagtatcttactacttagcctaaggatgggaaaatatctcttcctaatataccatctttctacagtatttcctacagctaaagcctcaggccattgcctaattaacaatgaagatttcatggacatcctacacttcaggattacttgactatctcaaacacataaatcaaaatgggccaagtagcaaatcttgatgaatttccactcttaccatccattcttactaccaacagtataactgaacatgtgattagaatgatctatattaatgtttagttatttttggttgagtgctaaatatttcagaaggctacttaacatgtaagataccaacttcaacactgtaataacatatactgtgaaaacattcctaaaaagtaaccaaagggtttgctaactctgcttcaacatccaacaacacaaaactatatgatttttaaaatcatgaaatagagacagcaaagcatatttttacatcaatttgtatcctatcatacttcataatatatatttgtatattcaaatttctattttataggcccaaggtgtgtttctccaaacattacattctcattgccaagtgccagctgttacacatggagaggaaatgattccttatattaaacctgaccagagctttttgccttctagggatttatttttcccatagtgtatcagttgttatgccacaataacaacaataataatgttcttaatgtccaaagtgctttgtcatttagagtcctttaacatctgttataccatgtgatgcccttgaacaccccattgggctattgtctgtgtattctgctctctttagcagatgatctgtaatttggtcattgttctgttatattccagattgctctacttgctaatatttgtatagaatagaatttatgtaaactagtaaccagttgatctctgtgccaaatacattatatcaggattacacaaaaagtatcacaaaggatggtcttggccatatgctagggcccctgtgaaaataagtagttttgagaagtttttctatatacgtatatatacacgtgtggttctatttaggtggggaaaaaatgaaaaagcagggacaacaggaggaaatgaaggcagagaaatatagtttcctttcctaggattgagacaattctatttttcatatactcgttgctcattaaatagtaaagggttgatttgctgcaagagtagctgagaattcaaaaacatccttgcagaatgattcaaaagacaaaagccaggctcaacttatagaatgttttggaaactggaagtaatgatacatttcacttcagaagcacttgtaggtctttactagtgctaagtattatggtgagctatcattaaagtgtgccatcttggataaaggccttttgcctactctcttctgcaattttgacacctcaatattcacacccataaacattactaagccccagttctatcgttggaaggagttgttattcttttgttgttcccttatgcaatttttaattctatgaatgttaagtttttttgagctaatgatagatagaaatgcccactcaaagaaaaataaacagagacaaatgttaaaattgccatacagactgtttttccccctgttgtttcactttaaaataaaaagaaatccttgattaatcagaatggcttgggacatgaacttaatttatttagttt

SEQ ID NO: 12 - DNA, 2205 bp, Homo sapiens
  misc_feature (1)..(2205): ZNF660 transcript nucleotide sequence
agttccttctgcgctttgttcaagatgtgggtctggcgctttcgtgactcaagaccctcttaggaacttcttcactgaactcaaggaggagatcaggcaagatctgtgctgtgcagatcctttggattgaggctgctgtgcacaggaatatggatggtgaaactgggactgaggaggagttaattccaaagcatcattcctgaaaaatcagaatcatacatactttcaagagaattccacagagacattgcccaggaagtcaaaatttagaaggctcctctgaagggaaagagaagactagagaggacactggtatgttccaagcaggagaaaatgaggagaaagacaagaaatttcaaacataagacagttaaagacaataaagtactcacagaagggagtgaccaagaatctgaaaaagacaatagtcagtgctgtgaccctgcaacaaatgagagagttcaggctgaaaagagacagtatgtatgtactgagtgtgggaaagcctttagtcagagtgcaaacctcacagtacatgagcgaatccacacgggagagaaaccctataagtgtaaggagtgtggaaaagctttcagtcatagctctaaccttgttgttcatcggagaatccacactggactgaagccctatacatgcagtgaatgtgggaaatctttcagtggaaagtcacatcttattcggcaccagggaatccacagtggggagaaaacttatgaatgtaaagagtgtgggaaagcctttagtcggagttcgggccttatatcacatcacagagttcacaccggagagaagccctattcttgtattgagtgtgggaaagcctttagccgtagttcaaaccttactcaacatcagcgaatgcacagaggaaaaaaagtttacaaatgtaaggagtgtgggaaaacatgtggttctaatacaaagattatggaccatcagagaattcacactggagagaagccttatgaatgtgatgagtgtggaaaaactttcatcttaaggaaaactcttaatgaacaccagagacttcatcgtagagagaaaccttacaaatgtaatgagtgtgggaaggcttttacttctaatcgaaaccttgttgatcatcagagagttcacactggagagaaaccctataaatgtaatgaatgtgggaaaaccttcaggcagacttctcaagttattctacacttgagaacccacactaaggagaaaccctataaatgtagtgagtgtgggaaagcctatcggtatagttcacagcttattcaacaccagaggaaacataatgaggagaaagaaacctcataaataacaaatattgtgggtagtagggctgactgctgcttttctaaaaagtagttctttagtatcaactttaattctacttctaagaatcatactctacttctaagaaaataattagaagtagacaaagattaatgaaagggatgttcatgacagcatcatatacgactgaaagaagaaaactagattttcaacattacagggttgaaatgaatgatgagctatccatatgatggttctgcagccattgcaaacatttttaaagacaatttaatgccatggggaaatgattggataagacggaagataatgacatacaatccaaaatttaaaaaaatatttttgcataggaaaaattgagaaggaagtaaaccaaaatgttaacagtgatcatctctgggcgataggattataggtgatttctattttcttctgtatacttttctatgctttctagattatctacatgagaatatactaattttatatgcaagaaaaaaagcacagtattttttaaatgcaatgaagacgtgcttattttcactcagcagtgttatgaaaggcacgtagtatatagagcccaaagccctgggattgcaccctgacactggcatttagcagcagtggaaccgcgagcaagtcccttccttttagagcgtgtttcctgttaagtaaaatcataaacaccgatcctttgtcctttttagttttaagacaagctgactttagagttgtcaacaaaatatataataacactgttaggttaaaagaacacagcaaaaattcactgaaccctcctttcccacagttctggaaggatctgcagatgatggagaactacctaggcttcatcttttcaacatatgtctacacaaccag

SEQ ID NO: 13 - protein, 1338 aa, Homo sapiens
  MISC_FEATURE (1)..(1338): AOX1 amino acid sequence of the AOX1 protein
MDRASELLFYVNGRKVIEKNVDPETMLLPYLRKKLRLTGTKYGCGGGGCGACTVMISRYNPITKRIRHHPANACLIPICSLYGAAVTTVEGIGSTHTRIHPVQERIAKCHGTQCGFCTPGMVMSIYTLLRNHPEPTLDQLTDALGGNLCRCTGYRPIIDACKTFCKTSGCCQSKENGVCCLDQGINGLPEFEEGSKTSPKLFAEEEFLPLDPTQELIFPPELMIMAEKQSQRTRVFGSERMMWFSPVTLKELLEFKFKYPQAPVIMGNTSVGPEVKFKGVFHPVIISPDRIEELSVVNHAYNGLTLGAGLSLAQVKDILADVVQKLPEEKTQMYHALLKHLGTLAGSQIRNMASLGGHIISRHPDSDLNPILAVGNCTLNLLSKEGKRQIPLNEQFLSKCPNADLKPQEILVSVNIPYSRKWEFVSAFRQAQRQENALAIVNSGMRVFFGEGDGIIRELCISYGGVGPATICAKNSCQKLIGRHWNEQMLDIACRLILNEVSLLGSAPGGKVEFKRTLIISFLFKFYLEVSQILKKMDPVHYPSLADKYESALEDLHSKHHCSTLKYQNIGPKQHPEDPIGHPIMHLSGVKHATGEAIYCDDMPLVDQELFLTFVTSSRAHAKIVSIDLSEALSMPGVVDIMTAEHLSDVNSFCFFTEAEKFLATDKVFCVGQLVCAVLADSEVQAKRAAKRVKIVYQDLEPLILTIEESIQHNSSFKPERKLEYGNVDEAFKVVDQILEGEIHMGGQEHFYMETQSMLVVPKGEDQEMDVYVSTQFPKYIQDIVASTLKLPANKVMCHVRRVGGAFGGKVLKTGIIAAVTAFAANKHGRAVRCVLERGEDMLITGGRHPYLGKYKAGFMNDGRILALDMEHYSNAGASLDESLFVIEMGLLKMDNAYKFPNLRCRGWACRTNLPSNTAFRGFGFPQAALITESCITEVAAKCGLSPEKVRIINMYKEIDQTPYKQEINAKNLIQCWRECMAMSSYSLRKVAVEKFNAENYWKKKGLAMVPLKFPVGLGSRAAGQAAALVHIYLDGSVLVTHGGIEMGQGVHTKMIQVVSRELRMPMSNVHLRGTSTETVPNANISGGSVVADLNGLAVKDACQTLLKRLEPIISKNPKGTWKDWAQTAFDESINLSAVGYFRGYESDMNWEKGEGQPFEYFVYGAACSEVEIDCLTGDHKNIRTDIVMDVGCSINPAIDIGQIEGAFIQGMGLYTIEELNYSPQGILHTRGPDQYKIPAICDMPTELHIALLPPSQNSNTLYSSKGLGESGVFLGCSVFFAIHDAVSAARQERGLHGPLTLNSPLTPEKIRMACEDKFTKMIPRDEPGSYVPWNVPI

SEQ ID NO: 14 - protein, 508 aa, Homo sapiens
  MISC_FEATURE (1)..(508): C1orf114 amino acid sequence of the C1orf114 protein
MNENKDTDSKKSEEYEDDFEKDLEWLINENEKSDASIIEMACEKEENINQDLKENETVMEHTKRHSDPDKSLQDEVSPRRNDIISVPGIQPLDPISDSDSENSFQESKLESQKDLEEEEDEEVRRYIMEKIVQANKLLQNQEPVNDKRERKLKFKDQLVDLEVPPLEDTTTFKNYFENERNMFGKLSQLCISNDFGQEDVLLSLTNGSCEENKDRTILVERDGKFELLNLQDIASQGFLPPINNANSTENDPQQLLPRSSNSSVSGTKKEDSTAKIHAVTHSSTGEPLAYIAQPPLNRKTCPSSAVNSDRSKGNGKSNHRTQSAHISPVTSTYCLSPRQKELQKQLEEKREKLKREEERRKIEEEKEKKRENDIVFKAWLQKKREQVLEMRRIQRAKEIEDMNSRENRDPQQAFRLWLKKKHEEQMKERQTEELRKQEECLFFLKGTEGRERAFKQWLRRKRMEKMAEQQAVRERTRQLRLEAKRSKQLQHHLYMSEAKPFRFTDHYN

SEQ ID NO: 15 - protein, 678 aa, Homo sapiens
  MISC_FEATURE (1)..(678): GAS6 amino acid sequence of the GAS6 protein
MAPSLSPGPAALRRAPQLLLLLLAAECALAALLPAREATQFLRPRQRRAFQVFEEAKQGHLERECVEELCSREEAREVFENDPETDYFYPRYLDCINKYGSPYTKNSGFATCVQNLPDQCTPNPCDRKGTQACQDLMGNFFCLCKAGWGGRLCDKDVNECSQENGGCLQICHNKPGSFHCSCHSGFELSSDGRTCQDIDECADSEACGEARCKNLPGSYSCLCDEGFAYSSQEKACRDVDECLQGRCEQVCVNSPGSYTCHCDGRGGLKLSQDMDTCEDILPCVPFSVAKSVKSLYLGRMFSGTPVIRLRFKRLQPTRLVAEFDFRTFDPEGILLFAGGHQDSTWIVLALRAGRLELQLRYNGVGRVTSSGPVINHGMWQTISVEELARNLVIKVNRDAVMKIAVAGDLFQPERGLYHLNLTVGGIPFHEKDLVQPINPRLDGCMRSWNWLNGEDTTIQETVKVNTRMQCFSVTERGSFYPGSGFAFYSLDYMRTPLDVGTESTWEVEVVAHIRPAADTGVLFALWAPDLRAVPLSVALVDYHSTKKLKKQLVVLAVEHTALALMEIKVCDGQEHVVTVSLRDGEATLEVDGTRGQSEVSAAQLQERLAVLERHLRSPVLTFAGGLPDVPVTSAPVTAFYRGCMTLEVNRRLLDLDEAAYKHSDITAHSCPPVEPAAA

SEQ ID NO: 16 - protein, 360 aa, Homo sapiens
  MISC_FEATURE (1)..(360): HAPLN3 amino acid sequence of the HAPLN3 protein
MGLLLLVPLLLLPGSYGLPFYNGFYYSNSANDQNLGNGHGKDLLNGVKLVVETPEETLFTYQGASVILPCRYRYEPALVSPRRVRVKWWKLSENGAPEKDVLVAIGLRHRSFGDYQGRVHLRQDKEHDVSLEIQDLRLEDYGRYRCEVIDGLEDESGLVELELRGVVFPYQSPNGRYQFNFHEGQQVCAEQAAVVASFEQLFRAWEEGLDWCNAGWLQDATVQYPIMLPRQPCGGPGLAPGVRSYGPRHRRLHRYDVFCFATALKGRVYYLEHPEKLTLTEAREACQEDDATIAKVGQLFAAWKFHGLDRCDAGWLADGSVRYPVVHPHPNCGPPEPGVRSFGFPDPQSRLYGVYCYRQH

SEQ ID NO: 17 - protein, 305 aa, Homo sapiens
  MISC_FEATURE (1)..(305): ST6GALNAC3 amino acid sequence of the ST6GALNAC3 protein
MACILKRKSVIAVSFIAAFLFLLVVRLVNEVNFPLLLNCFGQPGTKWIPFSYTYRRPLRTHYGYINVKTQEPLQLDCDLCAIVSNSGQMVGQKVGNEIDRSSCIWRMNNAPTKGYEEDVGRMTMIRVVSHTSVPLLLKNPDYFFKEANTTIYVIWGPFRNMRKDGNGIVYNMLKKTVGIYPNAQIYVTTEKRMSYCDGVFKKETGKDRVQSGSYLSTGWFTFLLAMDACYGIHVYGMINDTYCKTEGYRKVPYHYYEQGRDECDEYFLHEHAPYGGHRFITEKKVFAKWAKKHRIIFTHPNWTLS

SEQ ID NO: 18 - protein, 331 aa, Homo sapiens
  MISC_FEATURE (1)..(331): ZNF660 amino acid sequence of the ZNF660 protein
MRRKTRNFKHKTVKDNKVLTEGSDQESEKDNSQCCDPATNERVQAEKRQYVCTECGKAFSQSANLTVHERIHTGEKPYKCKECGKAFSHSSNLVVHRRIHTGLKPYTCSECGKSFSGKSHLIRHQGIHSGEKTYECKECGKAFSRSSGLISHHRVHTGEKPYSCIECGKAFSRSSNLTQHQRMHRGKKVYKCKECGKTCGSNTKIMDHQRIHTGEKPYECDECGKTFILRKTLNEHQRLHRREKPYKCNECGKAFTSNRNLVDHQRVHTGEKPYKCNECGKTFRQTSQVILHLRTHTKEKPYKCSECGKAYRYSSQLIQHQRKHNEEKETS

SEQ ID NO: 19 - DNA, 501 bp, Homo sapiens
  misc_feature (1)..(501): Nucleotide 4796-5296 of SEQ ID NO.: 1. CpG island in AOX1 gene promoter
cgctaagcgccactggcgaggagatgaaggggtcgtcttcatcttcgccggatgatttccgcccacatagagggcgccagtgacgcccacacacgtgctggtgtcccgggaagagttcctggcaaagagctcaggaacgttggatcttaatcaaggctttctccgtcggggtggatgggttggactttaggctccagcaagccccgccccactcggcgggtcggtgccgccgggtcccaggtgcccgctacttcccagaacctccgcctcccgctccgggccctcgaaccagcgcggacaccacaatggaccgggcgtccgagctgctcttctacgtgaacggccgcaaggtgagcgcccgcgggcttcctctgcccccagacctgcggccagggccggggcagagaggagcccctgccgttcgtcccatcctttcgtgcccgccgtttaaggcactcaggcacggactggctttctcccgtaacagcggctttgccttcg

SEQ ID NO: 20 - DNA, 248 bp, Homo sapiens
  misc_feature (1)..(248): Nucleotide 4801-5048 of SEQ ID NO.: 2 CpG island in C1orf114 gene promoter
cggcacttcgcgagtctctataacgttagtgatgcgtggattccttagtcgtccccttagaaacctcagcttcactggcccttcgcaagcaccgggatgggtgccgggaggggtcggtggtctgaggatattgcatgcgcctgcgcagatttttgtcgctctcgtagttagagaggcccggatggaggacgcagaggcacgctgttgccatggcagtgtggtcctggctgccgcggaggcaggtgccg

SEQ ID NO: 21 - DNA, 1399 bp, Homo sapiens
  misc_feature (1)..(1399): Nucleotide 4840-6238 of SEQ ID NO.: 3, CpG island in GAS6 gene promoter
cgcctggggagacgctccttttccgaaacactcgagtcccgccgcgtcccggacgctccgctttccccgcgcccggatcctcccgggaacccgcgccccgcccgcgcgctggtcccgcccccgccgcctccccgcgcgcagccgcccgaacacgcccagaccgagcgcttgaggtgccgcagccgccgccgccgccgccgccgcgatgtgaccttcagggccgccaggacgggatgaccggagcctccgccccgcggcgcccgcggctcgcctcggcctcccgggcgctctgaccgcgcgtccccggcccgccatggccccttcgctctcgcccgggcccgccgccctgcgccgcgcgccgcagctgctgctgctgctgctggccgcggagtgcgcgcttggtgagtcccgcgggcccgagaccccgtccccgggcggcgggaggaggctccgggcgcggcttgacgcgtccccctctctccctccgggcagccgcgctgttgccggcgcgcgaggccacgcagttcctgcggcccaggcagcgccgcgcctttcaggtcttcgaggaggccaagcagggccacctggagagggagtgcgtggaggagctgtgcagccgcgaggaggcgcgggaggtgttcgagaacgaccccgagacggtgagcagccggcgggcgggatgcgggggaacccctggcgcccgcgcgcctccaaccgctcccgagaggcagcgctgctgccgccccccagctccgcgcggcgaggcctggcctcagggtcccaggagccccggcccgccccgcgtcccccacgcccatcccccggcgaccccgggatccccgcgcaggccggtgagacgctgcggggctgtccgggaaacgctcgctgtcagacgcctccccgcggggaagccgggagtccgtttccaaagtgcgagagaaacacaatggttaaaacccaaaccgcttccccgcggccctccctctgctgggctggaggtgaggaacccccgggccgcgcctcgtcctcctgagaggggtggagagcagtcccctcccgaaagaggaattgaaagggccgagggcgggaactgcttgcggcagcaggtccaaaaataagattccaggaatcgagcggggccgcatgcgggaggggagggcggctccgcggccccgttctgccaggtgctctcctggaggcagcgggtgctttcaggagcccgacggtgctggccccggcacctcggttaggaatgtccttggagaaggcggggcgcccggggccgcctcccgcaggagccgccgtgtgaggacggcctggccactctatcctgcgggctcgggagcgggtgactttggaaagtccgagaaggtgtggattcccgttgacgtccctcccg

SEQ ID NO: 22 - DNA, 674 bp, Homo sapiens
  misc_feature (1)..(674): Nucleotide 4920-5593 SEQ ID NO.: 4 HAPLN3 gene
cgcgtgttcctttaaggggctggtctggcgggagcgcgggggtttttctgctgccgcttcctttctgcccttttaatttccccgaaatcagactgctgccttggaccgggacagctcgcggcccccgagagctctagccgtcgaggagctgcctggggacggtacgtggcttaggggtcgctgggcttctggggctgtgtgcgggccgggttcctcccttaccgctttgggtgccctgcgggtccccacacctcccgggcagggtccggggaaggggcaggaggcgtgggccgggcactgcggaggcccgggctgagatgggctgtgatcgcgggcgaggggcgcccggggcacaagtggggagggagcggcgcggggatgcgggcgccggaccctcgtgcccaccgtgagggagcagagcccgagcggaccccgtggcctccgagaccaccgtccgcctccagcccccttcctgccagggtccgcttggctctctcccctgtcgtctgtccagggtcggctgcctccagtgccgtccgcggcgccccaggccctgcccctgggtatctgttggatgctccgggggccccgggagtcctgggaggggctgagggcaacctgcgaggcggctggcggacctgcgcctctggaccgcagctggccggctctgggcg

SEQ ID NO: 23 - DNA, 506 bp, Homo sapiens
  misc_feature (1)..(506): Nucleotide 4759-5264 of SEQ ID NO.: 5. ST6GALNAC3 gene
cggaaccgagaagaaaaggccgtactctgccccccgcgggacccaggtccccgcctgctgcagagcgcactctgcgcacgtcgagccgcgaaaggttcacagaagaaaacaagagaaagaagtagcaggcactgaggagccgccggcgccggcgcccaggacggcacgtgacccgggggcggggccgcgcgggccgcgggccagtggatggggacgggggcggggccgcggctcggggggcggggtctgtggcggcgcagcttacaccgcggtccccttatttggatctgcgggaatgtgggctggagaggtcctgccgtggtaccagcctccagcctgcccccaggactgcccctgacccaggcgcgcccgctgctcggtggcaggagggccggcggagcgccatggcctgcatcctgaaggtaacgacttggatctgtggctcggacgcgtggttggccagccccttgctgctcagaggcacggagtcagccgcggtcccaccg

SEQ ID NO: 24 - DNA, 20 bp, Artificial Sequence
  PCR primer
ctaaaggctgcgttttcagg

SEQ ID NO: 25 - DNA, 20 bp, Artificial Sequence
  PCR primer
cttgtgagccttggaaggag

SEQ ID NO: 26 - DNA, 20 bp, Artificial Sequence
  PCR primer
gggagggagggtaggtagtg

SEQ ID NO: 27 - DNA, 20 bp, Artificial Sequence
  PCR primer
ttaccagacttccccaccag

SEQ ID NO: 28 - DNA, 20 bp, Artificial Sequence
  PCR primer
gctcttttccaccagctttg

SEQ ID NO: 29 - DNA, 20 bp, Artificial Sequence
  PCR primer
ctcgcgctctctctttccta

SEQ ID NO: 30 - DNA, 20 bp, Artificial Sequence
  PCR primer
ctctctcccatcccttctcc

SEQ ID NO: 31 - DNA, 20 bp, Artificial Sequence
  PCR primer
cctagtcccagggctttgat

SEQ ID NO: 32 - DNA, 20 bp, Artificial Sequence
  PCR primer
cagtgggattggatctgacc

SEQ ID NO: 33 - DNA, 20 bp, Artificial Sequence
  PCR primer
cccgaatctactgcatcctt

SEQ ID NO: 34 - DNA, 20 bp, Artificial Sequence
  PCR primer
atcagactgctgccttggac

SEQ ID NO: 35 - DNA, 20 bp, Artificial Sequence
  PCR primer
caaagcggtaagggaggaac

SEQ ID NO: 36 - DNA, 20 bp, Artificial Sequence
  PCR primer
tatctcctcgtgggttcctg

SEQ ID NO: 37 - DNA, 20 bp, Artificial Sequence
  PCR primer
tccacccatcctctgaactc

SEQ ID NO: 38 - DNA, 20 bp, Artificial Sequence
  PCR primer
cctgatcctgagggaggagt

SEQ ID NO: 39 - DNA, 20 bp, Artificial Sequence
  PCR primer
ttgttggccccaaagttaag

1. A method of determining if an individual has, or is at risk of developing prostate cancer, the method comprising the steps of:
a) providing a sample obtained from said individual;
b) determining in the sample of a),
the methylation level, and/or
the transcriptional expression level, and/or
the translational expression level,
of a panel of nucleotide sequences, wherein the panel comprises:
I′) the nucleotide sequence of SEQ ID NO:3 (GAS6); or
I″) a nucleotide sequence being complementary to SEQ ID NO: 3; or
I″′) a nucleotide sequence having at least 90% sequence identity to any one of I′ or I″; or
I″″) a fragment of any one of I′, I″ or I″′, wherein the fragment comprises at least 15 consecutive nucleotides of any one of I′, I″ or I″′; and
II′) the nucleotide sequence of SEQ ID NO:4 (HAPLN3); or
II″) a nucleotide sequence being complementary to SEQ ID NO: 4; or
II″′) a nucleotide sequence having at least 90% sequence identity to any one of II′ or II″; or
II″″) a fragment of any one of II′, II″ or II″′, wherein the fragment comprises at least 15 consecutive nucleotides of any one of I′, I″ or I″′; and
III′) the nucleotide sequence of SEQ ID NO:1 (AOX1); or
III″) a nucleotide sequence being complementary to SEQ ID NO: 1; or
III″′) a nucleotide sequence having at least 90% sequence identity to any one of III′ or III″′; or
III″″) a fragment of any one of III′, III″ or III″′, wherein the fragment comprises at least 15 consecutive nucleotides of any one of III′, III″ or III″′; and
IV′) the nucleotide sequence of SEQ ID NO:2 (C1orf114); or
IV″) a nucleotide sequence being complementary to SEQ ID NO: 2; or
IV″′) a nucleotide sequence having at least 90% sequence identity to any one of IV′ or IV″; or
IV″″) a fragment of any one of IV′, IV″ or IV″′, wherein the fragment comprises at least 15 consecutive nucleotides of any one of IV′, IV″ or IV″′; and
V′) the nucleotide sequence of SEQ ID NO:5 (ST6GALNAC3); or
V″) a nucleotide sequence being complementary to SEQ ID NO: 5; or
V″′) a nucleotide sequence having at least 90% sequence identity to any one of V′ or V″; or
V″″) a fragment of any one of V′, V″ or V″′, wherein the fragment comprises at least 15 consecutive nucleotides of any one of V′, V″ or V″′; and
VI′) the nucleotide sequence of SEQ ID NO:6 (ZNF660); or
VI″) a nucleotide sequence being complementary to SEQ ID NO: 6; or
VI″′) a nucleotide sequence having at least 90% sequence identity to any one of VI′ or VI″; or
VI″″) a fragment of any one of VI′, VI″ or VI″′, wherein the fragment comprises at least 15 consecutive nucleotides of any one of VI′, VI″ or VI″′;
c) comparing
the methylation level, transcriptional level, and/or translational expression level of the sampled nucleotide sequence of b),
with
the corresponding methylation level, transcriptional level, and/or translational expression level of a corresponding nucleotide sequence of a control sample,
wherein
a methylation level being significantly higher than the methylation level of the control sample,
and/or
a transcriptional and/or a translational expression level being significantly lower than the transcriptional level of the control sample,
is indicative of that the individual has, or is at risk of developing prostate cancer.

2. A method of determining if an individual has, or is at risk of developing prostate cancer, the method comprising the steps of:
a) providing a sample obtained from said individual;
b) determining in the sample of a),
the methylation level, and/or
the transcriptional expression level, and/or
the translational expression level,
of a panel comprising at least two nucleotide sequences, wherein the panel is selected from the group consisting of:
i) C1orf114 (SEQ ID NO:2) and GAS6 (SEQ ID NO:3);
ii) GAS6 (SEQ ID NO:3) and HAPLN3 (SEQ ID NO:4);
iii) C1orf114 (SEQ ID NO:2), GAS6 (SEQ ID NO:3) and HAPLN3 (SEQ ID NO:4);
iv) AOX1 (SEQ ID NO:1), C1orf114 (SEQ ID NO:2), GAS6 (SEQ ID NO:3) and HAPLN3 (SEQ ID NO:4);
v) AOX1 (SEQ ID NO:1), GAS6 (SEQ ID NO:3) and HAPLN3 (SEQ ID NO:4);
vi) AOX1 (SEQ ID NO:1), C1orf114 (SEQ ID NO:2) and GAS6 (SEQ ID NO:3);
vii) AOX1 (SEQ ID NO:1) and GAS6 (SEQ ID NO:3);
viii) C1orf114 (SEQ ID NO:2) and HAPLN3 (SEQ ID NO:4);
ix) AOX1 (SEQ ID NO:1), C1orf114 (SEQ ID NO:2) and HAPLN3 (SEQ ID NO:4);
x) AOX1 (SEQ ID NO:1) and HAPLN3 (SEQ ID NO:4);
xi) AOX1 (SEQ ID NO:1) and C1orf114 (SEQ ID NO:2);
xii) AOX1 (SEQ ID NO:1) and ST6GALNAC3 (SEQ ID NO:5);
xiii) AOX1 (SEQ ID NO:1) and ZNF660 (SEQ ID NO:6);
xiv) C1orf114 (SEQ ID NO:2) and ST6GALNAC3 (SEQ ID NO:5);
xv) C1orf114 (SEQ ID NO:2) and ZNF660 (SEQ ID NO:6);
xvi) GAS6 (SEQ ID NO:3) and ST6GALNAC3 (SEQ ID NO:5);
xvii) GAS6 (SEQ ID NO:3) and ZNF660 (SEQ ID NO:6);
xviii) HAPLN3 (SEQ ID NO:4) and ST6GALNAC3 (SEQ ID NO:5);
xix) HAPLN3 (SEQ ID NO:4) and ZNF660 (SEQ ID NO:6);
xx) ST6GALNAC3 (SEQ ID NO:5) and ZNF660 (SEQ ID NO:6);
xxi) AOX1 (SEQ ID NO:1), C1orf114 (SEQ ID NO:2) and ST6GALNAC3 (SEQ ID NO:5);
xxii) AOX1 (SEQ ID NO:1), C1orf114 (SEQ ID NO:2) and ZNF660 (SEQ ID NO:6);
xxiii) AOX1 (SEQ ID NO:1), GAS6 (SEQ ID NO:3) and ST6GALNAC3 (SEQ ID NO:5);
xxiv) AOX1 (SEQ ID NO:1), GAS6 (SEQ ID NO:3) and ZNF660 (SEQ ID NO:6);
xxv) AOX1 (SEQ ID NO:1), HAPLN3 (SEQ ID NO:4) and ST6GALNAC3 (SEQ ID NO:5);
xxvi) AOX1 (SEQ ID NO:1), HAPLN3 (SEQ ID NO:4) and ZNF660 (SEQ ID NO:6);
xxvii) AOX1 (SEQ ID NO:1), ST6GALNAC3 (SEQ ID NO:5) and ZNF660 (SEQ ID NO:6);
xxviii) C1orf114 (SEQ ID NO:2), GAS6 (SEQ ID NO:3) and ST6GALNAC3 (SEQ ID NO:5);
xxix) C1orf114 (SEQ ID NO:2), GAS6 (SEQ ID NO:3) and ZNF660 (SEQ ID NO:6);
xxx) C1orf114 (SEQ ID NO:2), HAPLN3 (SEQ ID NO:4) and ST6GALNAC3 (SEQ ID NO:5);
xxxi) C1orf114 (SEQ ID NO:2), HAPLN3 (SEQ ID NO:4) and ZNF660 (SEQ ID NO:6);
xxxii) C1orf114 (SEQ ID NO:2), ST6GALNAC3 (SEQ ID NO:5) and ZNF660 (SEQ ID NO:6);
xxxiii) GAS6 (SEQ ID NO:3), HAPLN3 (SEQ ID NO:4) and ST6GALNAC3 (SEQ ID NO:5);
xxxiv) GAS6 (SEQ ID NO:3), HAPLN3 (SEQ ID NO:4) and ZNF660 (SEQ ID NO:6);
xxxv) GAS6 (SEQ ID NO:3), ST6GALNAC3 (SEQ ID NO:5) and ZNF660 (SEQ ID NO:6);
xxxvi) HAPLN3 (SEQ ID NO:4), ST6GALNAC3 (SEQ ID NO:5) and ZNF660 (SEQ ID NO:6);
xxxvii) AOX1 (SEQ ID NO:1), C1orf114 (SEQ ID NO:2) and GAS6 (SEQ ID NO:3) and ST6GALNAC3 (SEQ ID NO:5);
xxxviii) AOX1 (SEQ ID NO:1), C1orf114 (SEQ ID NO:2) GAS6 (SEQ ID NO:3) and ZNF660 (SEQ ID NO:6);
xxxix) AOX1 (SEQ ID NO:1), C1orf114 (SEQ ID NO:2), HAPLN3 (SEQ ID NO:4),
xl) AOX1 (SEQ ID NO:1), C1orf114 (SEQ ID NO:2), HAPLN3 (SEQ ID NO:4), and ST6GALNAC3 (SEQ ID NO:5);
xli) AOX1 (SEQ ID NO:1), C1orf114 (SEQ ID NO:2), ST6GALNAC3 (SEQ ID NO:5) and ZNF660 (SEQ ID NO:6);
xlii) AOX1 (SEQ ID NO:1), GAS6 (SEQ ID NO:3), HAPLN3 (SEQ ID NO:4) and ST6GALNAC3 (SEQ ID NO:5);
xliii) AOX1 (SEQ ID NO:1), GAS6 (SEQ ID NO:3) and HAPLN3 (SEQ ID NO:4);
xliv) AOX1 (SEQ ID NO:1), GAS6 (SEQ ID NO:3) and ST6GALNAC3 (SEQ ID NO:5);
xlv) AOX1 (SEQ ID NO:1), HAPLN3 (SEQ ID NO:4), ST6GALNAC3 (SEQ ID NO:5) and ZNF660 (SEQ ID NO:6);
xlvi) C1orf114 (SEQ ID NO:2), GAS6 (SEQ ID NO:3), HAPLN3 (SEQ ID NO:4) and ST6GALNAC3 (SEQ ID NO:5);
xlvii) C1orf114 (SEQ ID NO:2), GAS6 (SEQ ID NO:3), HAPLN3 (SEQ ID NO:4) and ZNF660 (SEQ ID NO:6);
xlviii) C1orf114 (SEQ ID NO:2), GAS6 (SEQ ID NO:3), ST6GALNAC3 (SEQ ID NO:5) and ZNF660 (SEQ ID NO:6);
xlix) C1orf114 (SEQ ID NO:2), HAPLN3 (SEQ ID NO:4), ST6GALNAC3 (SEQ ID NO:5) and ZNF660 (SEQ ID NO:6);
l) GAS6 (SEQ ID NO:3), HAPLN3 (SEQ ID NO:4), ST6GALNAC3 (SEQ ID NO:5) and ZNF660 (SEQ ID NO:6);
li) AOX1 (SEQ ID NO:1), C1orf114 (SEQ ID NO:2), GAS6 (SEQ ID NO:3), HAPLN3 (SEQ ID NO:4) and ST6GALNAC3 (SEQ ID NO:5);
lii) AOX1 (SEQ ID NO:1), C1orf114 (SEQ ID NO:2), GAS6 (SEQ ID NO:3), HAPLN3 (SEQ ID NO:4) and ZNF660 (SEQ ID NO:6);
liii) AOX1 (SEQ ID NO:1), C1orf114 (SEQ ID NO:2), GAS6 (SEQ ID NO:3), ST6GALNAC3 (SEQ ID NO:5) and ZNF660 (SEQ ID NO:6);
liv) AOX1 (SEQ ID NO:1), C1orf114 (SEQ ID NO:2), HAPLN3 (SEQ ID NO:4), ST6GALNAC3 (SEQ ID NO:5) and ZNF660 (SEQ ID NO:6);
lv) AOX1 (SEQ ID NO:1), GAS6 (SEQ ID NO:3), HAPLN3 (SEQ ID NO:4), ST6GALNAC3 (SEQ ID NO:5) and ZNF660 (SEQ ID NO:6);
lvi) C1orf114 (SEQ ID NO:2), GAS6 (SEQ ID NO:3), HAPLN3 (SEQ ID NO:4),
lvii) ST6GALNAC3 (SEQ ID NO:5) and ZNF660 (SEQ ID NO:6); AOX1 (SEQ ID NO:1), C1orf114 (SEQ ID NO:2), GAS6 (SEQ ID NO:3), HAPLN3 (SEQ ID NO:4), ST6GALNAC3 (SEQ ID NO:5) and ZNF660 (SEQ ID NO:6);
wherein any one of said SEQ ID NO: 1, 2, 3, 4, 5 or 6 of said panels i) through lvii) optionally is individually replaced by:
b′) a nucleotide sequence being complementary to any one of said SEQ ID NO:s 1, 2, 3, 4, 5 or 6 of said panels i) through lvii); or
b″) a nucleotide sequence having at least 90% sequence identity to any one of said SEQ ID NO:s 1, 2, 3, 4, 5 or 6 of said panels i) through lvii), or the complementary nucleotide sequences of b′); or
b″′) a fragment comprising at least 15 consecutive nucleotides of any one of said SEQ ID NO:s 1, 2, 3, 4, 5 or 6 of said panels i) through lvii), or the nucleotide sequences of b′), or the nucleotide sequences of b″);
c) comparing
the methylation level, transcriptional level, and/or translational expression level of the sampled nucleotide sequences of b),
with
the corresponding methylation level, transcriptional level, and/or translational expression level of a corresponding nucleotide sequences of a control sample,
wherein
a methylation level being significantly higher than the methylation level of the control sample,
and/or
a transcriptional and/or a translational expression level being significantly lower than the transcriptional level of the control sample,
is indicative of that the individual has, or is at risk of developing prostate cancer.

3. A method of determining if an individual has, or is at risk of developing prostate cancer, the method comprising the steps of:
a) providing a sample obtained from said individual;
b) determining in the sample of a),
the methylation level, and/or
the transcriptional expression level, and/or
the translational expression level,
of one or more nucleotide sequences selected from the group consisting of:
I′) the nucleotide sequence of SEQ ID NO:5 (ST6GALNAC3); or
I″) a nucleotide sequence being complementary to SEQ ID NO: 5; or
I″′) a nucleotide sequence having at least 90% sequence identity to any one of I′ or I″; or
I″″) a fragment of any one of I′, I″ or I″′, wherein the fragment comprises at least 15 consecutive nucleotides of any one of I′, I″ or I″′; and
II′) the nucleotide sequence of SEQ ID NO:6 (ZNF660); or
II″) a nucleotide sequence being complementary to SEQ ID NO: 6; or
II″′) a nucleotide sequence having at least 90% sequence identity to any one of II′ or II″; or
II″″) a fragment of any one of II′, II″ or I″′, wherein the fragment comprises at least 15 consecutive nucleotides of any one of II′, II″ or II″′;
c) comparing
the methylation level, transcriptional level, and/or translational expression level of the sampled nucleotide sequence of b),
with
the corresponding methylation level, transcriptional level, and/or translational expression level of a corresponding nucleotide sequence of a control sample,
wherein
a methylation level being significantly higher than the methylation level of the control sample,
and/or
a transcriptional and/or a translational expression level being significantly lower than the transcriptional level of the control sample,
is indicative of that the individual has, or is at risk of developing prostate cancer.

4. A method of identifying a prostate cancer patient in need of adjuvant therapy, comprising:
a) providing a sample obtained from cancerous tissue of an individual;
b) determining in the sample of a),
the methylation level, and/or
the transcriptional expression level, and/or
the translational expression level,
of one or more biomarkers, wherein the biomarkers are nucleotide sequences selected from the group consisting of:
I′) the nucleotide sequence of SEQ ID NO:3 (GAS6); or
I″) a nucleotide sequence being complementary to SEQ ID NO: 3; or
I″′) a nucleotide sequence having at least 90% sequence identity to any one of I′ or I″; or
I″″) a fragment of any one of I′, I″ or I″′, wherein the fragment comprises at least 15 consecutive nucleotides of any one of I′, I″ or I″′; and
II′) the nucleotide sequence of SEQ ID NO:4 (HAPLN3); or
II″) a nucleotide sequence being complementary to SEQ ID NO: 4; or
II″′) a nucleotide sequence having at least 90% sequence identity to any one of II′ or II″; or
II″″) a fragment of any one of II′, II″ or II″′, wherein the fragment comprises at least 15 consecutive nucleotides of any one of I′, I″ or I″′; and
III′) the nucleotide sequence of SEQ ID NO:1 (AOX1); or
III″) a nucleotide sequence being complementary to SEQ ID NO: 1; or
III″′) a nucleotide sequence having at least 90% sequence identity to any one of III′ or III″′; or
III″″) a fragment of any one of III′, III″ or III″′, wherein the fragment comprises at least 15 consecutive nucleotides of any one of III′, III″ or III″′; and
IV′) the nucleotide sequence of SEQ ID NO:2 (C1orf114); or
IV″) a nucleotide sequence being complementary to SEQ ID NO: 2; or
IV″′) a nucleotide sequence having at least 90% sequence identity to any one of IV′ or IV″; or
IV″″) a fragment of any one of IV′, IV″ or IV″′, wherein the fragment comprises at least 15 consecutive nucleotides of any one of IV′, IV″ or IV″′; and
V′) the nucleotide sequence of SEQ ID NO:5 (ST6GALNAC3); or
V″) a nucleotide sequence being complementary to SEQ ID NO: 5; or
V″′) a nucleotide sequence having at least 90% sequence identity to any one of V′ or V″; or
V″″) a fragment of any one of V′, V″ or V″′, wherein the fragment comprises at least 15 consecutive nucleotides of any one of V′, V″ or V″′; and
VI′) the nucleotide sequence of SEQ ID NO:6 (ZNF660); or
VI″) a nucleotide sequence being complementary to SEQ ID NO: 6; or
VI″′) a nucleotide sequence having at least 90% sequence identity to any one of VI′ or VI″; or
VI″″) a fragment of any one of VI′, VI″ or VI″′, wherein the fragment comprises at least 15 consecutive nucleotides of any one of VI′, VI″ or VI″′;
c) obtaining biomarker scores based on the methylation level, transcriptional level, and/or translational expression level of the sampled nucleotide sequence of b), wherein the biomarker scores indicate if the patient is in need of adjuvant therapy.

5. A method for prognosing disease progression of prostate cancer in a patient, said method comprising the steps of:
a) providing a sample obtained from cancerous tissue of an individual;
b) determining in the sample of a),
the methylation level, and/or
the transcriptional expression level, and/or
the translational expression level,
of one or more biomarkers, wherein the biomarkers are nucleotide sequences selected from the group consisting of:
I′) the nucleotide sequence of SEQ ID NO:2 (C1orf114); or
I″) a nucleotide sequence being complementary to SEQ ID NO: 2; or
I″′) a nucleotide sequence having at least 90% sequence identity to any one of I′ or I″; or
I″″) a fragment of any one of I′, I″ or I″′, wherein the fragment comprises at least 15 consecutive nucleotides of any one of I′, I″ or I″′; and
II′) the nucleotide sequence of SEQ ID NO:4 (HAPLN3); or
II″) a nucleotide sequence being complementary to SEQ ID NO: 4; or
II″′) a nucleotide sequence having at least 90% sequence identity to any one of II′ or II″; or
II″″) a fragment of any one of II′, II″ or II″′, wherein the fragment comprises at least 15 consecutive nucleotides of any one of I′, I″ or I″′; and
III′) the nucleotide sequence of SEQ ID NO:1 (AOX1); or
III″) a nucleotide sequence being complementary to SEQ ID NO: 1; or
III″′) a nucleotide sequence having at least 90% sequence identity to any one of III′ or III″′; or
III″″) a fragment of any one of III′, III″ or III″′, wherein the fragment comprises at least 15 consecutive nucleotides of any one of III′, III″ or III″′; and
IV′) the nucleotide sequence of SEQ ID NO:3 (GAS6); or
IV″) a nucleotide sequence being complementary to SEQ ID NO: 4; or
IV″′) a nucleotide sequence having at least 90% sequence identity to any one of IV′ or IV″; or
IV″″) a fragment of any one of IV′, IV″ or IV″′, wherein the fragment comprises at least 15 consecutive nucleotides of any one of IV′, IV″ or IV″′; and
V′) the nucleotide sequence of SEQ ID NO:5 (ST6GALNAC3); or
V″) a nucleotide sequence being complementary to SEQ ID NO: 5; or
V″′) a nucleotide sequence having at least 90% sequence identity to any one of V′ or V″; or
V″″) a fragment of any one of V′, V″ or V″′, wherein the fragment comprises at least 15 consecutive nucleotides of any one of V′, V″ or V″′; and
VI′) the nucleotide sequence of SEQ ID NO:6 (ZNF660); or
VI″) a nucleotide sequence being complementary to SEQ ID NO: 6; or
VI″′) a nucleotide sequence having at least 90% sequence identity to any one of VI′ or VI″; or
VI″″) a fragment of any one of VI′, VI″ or VI″′, wherein the fragment comprises at least 15 consecutive nucleotides of any one of VI′, VI″ or VI″′;
c) obtaining a biomarker score based on the methylation level, transcriptional level, and/or translational expression level of the sampled nucleotide sequence of b), wherein the biomarker score is indicative of the prognosis of the prostate cancer patient.

6. The method according to claim 5, wherein the adjuvant therapy is selected from the group consisting of radiation therapy, chemotherapy, immunotherapy, hormone therapy, and targeted therapy.

7. A method for prognosing disease progression of prostate cancer in a patient, said method comprising the steps of:
a) providing a sample obtained from cancerous tissue of an individual;
b) determining in the sample of a),
the methylation level, and/or
the transcriptional expression level, and/or
the translational expression level,
of a panel comprising one or more nucleotide sequences, wherein the panel is selected from the group consisting of:
i) C1orf114 (SEQ ID NO:2) and HAPLN3 (SEQ ID NO:4);
ii) AOX (SEQ ID NO:1) and C1orf114 (SEQ ID NO:2);
iii) AOX (SEQ ID NO:1), C1orf114 (SEQ ID NO:2) and GAS6 (SEQ ID NO:3);
iv) C1orf114 (SEQ ID NO:2), GAS6 (SEQ ID NO:3) and HAPLN3 (SEQ ID NO:4);
v) C1orf114 (SEQ ID NO:2);
vi) AOX (SEQ ID NO:1), C1orf114 (SEQ ID NO:2) and HAPLN3 (SEQ ID NO:4);
vii) AOX (SEQ ID NO:1), C1orf114 (SEQ ID NO:2), GAS6 (SEQ ID NO:3) and HAPLN3 (SEQ ID NO:4);
viii) C1orf114 (SEQ ID NO:2) and GAS6 (SEQ ID NO:3);
ix) AOX (SEQ ID NO:1) and GAS6 (SEQ ID NO:3);
x) AOX (SEQ ID NO:1);
xi) HAPLN3 (SEQ ID NO:4);
xii) AOX (SEQ ID NO:1) and HAPLN3 (SEQ ID NO:4);
xiii) AOX (SEQ ID NO:1), GAS6 (SEQ ID NO:3) and HAPLN3 (SEQ ID NO:4);
xiv) GAS6 (SEQ ID NO:3) and HAPLN3 (SEQ ID NO:4);
xv) GAS6 (SEQ ID NO:3);
xvi) ST6GALNAC3 (SEQ ID NO:5);
xvii) ZNF660 (SEQ ID NO:6);
xviii) AOX (SEQ ID NO:1) and ST6GALNAC3 (SEQ ID NO:5);
xix) AOX (SEQ ID NO:1) and ZNF660 (SEQ ID NO:6);
xx) C1orf114 (SEQ ID NO:2) and ST6GALNAC3 (SEQ ID NO:5);
xxi) C1orf114 (SEQ ID NO:2) and ZNF660 (SEQ ID NO:6);
xxii) GAS6 (SEQ ID NO:3) and ST6GALNAC3 (SEQ ID NO:5);
xxiii) GAS6 (SEQ ID NO:3) and ZNF660 (SEQ ID NO:6);
xxiv) HAPLN3 (SEQ ID NO:4) and ST6GALNAC3 (SEQ ID NO:5);
xxv) HAPLN3 (SEQ ID NO:4) and ZNF660 (SEQ ID NO:6);
xxvi) ST6GALNAC3 (SEQ ID NO:5) and ZNF660 (SEQ ID NO:6);
xxvii) AOX (SEQ ID NO:1), C1orf114 (SEQ ID NO:2) and ST6GALNAC3 (SEQ ID NO:5);
xxviii) AOX (SEQ ID NO:1), C1orf114 (SEQ ID NO:2) and ZNF660 (SEQ ID NO:6);
xxix) AOX (SEQ ID NO:1), GAS6 (SEQ ID NO:3) and ST6GALNAC3 (SEQ ID NO:5);
xxx) AOX (SEQ ID NO:1), GAS6 (SEQ ID NO:3) and ZNF660 (SEQ ID NO:6);
xxxi) AOX (SEQ ID NO:1), HAPLN3 (SEQ ID NO:4) and ST6GALNAC3 (SEQ ID NO:5);
xxxii) AOX (SEQ ID NO:1), HAPLN3 (SEQ ID NO:4) and ZNF660 (SEQ ID NO:6);
xxxiii) AOX (SEQ ID NO:1), ST6GALNAC3 (SEQ ID NO:5) and ZNF660 (SEQ ID NO:6);
xxxiv) C1orf114 (SEQ ID NO:2), GAS6 (SEQ ID NO:3) and ST6GALNAC3 (SEQ ID NO:5);
xxxv) C1orf114 (SEQ ID NO:2), GAS6 (SEQ ID NO:3) and ZNF660 (SEQ ID NO:6);
xxxvi) C1orf114 (SEQ ID NO:2), HAPLN3 (SEQ ID NO:4) and ST6GALNAC3 (SEQ ID NO:5);
xxxvii) C1orf114 (SEQ ID NO:2), HAPLN3 (SEQ ID NO:4) and ZNF660 (SEQ ID NO:6);
xxxviii) C1orf114 (SEQ ID NO:2), ST6GALNAC3 (SEQ ID NO:5) and ZNF660 (SEQ ID NO:6);
xxxix) GAS6 (SEQ ID NO:3), HAPLN3 (SEQ ID NO:4) and ST6GALNAC3 (SEQ ID NO:5);
xl) GAS6 (SEQ ID NO:3), HAPLN3 (SEQ ID NO:4) and ZNF660 (SEQ ID NO:6);
xli) GAS6 (SEQ ID NO:3), ST6GALNAC3 (SEQ ID NO:5) and ZNF660 (SEQ ID NO:6);
xlii) HAPLN3 (SEQ ID NO:4), ST6GALNAC3 (SEQ ID NO:5) and ZNF660 (SEQ ID NO:6);
xliii) AOX (SEQ ID NO:1), C1orf114 (SEQ ID NO:2), GAS6 (SEQ ID NO:3) and ST6GALNAC3 (SEQ ID NO:5);
xliv) AOX (SEQ ID NO:1), C1orf114 (SEQ ID NO:2), GAS6 (SEQ ID NO:3) and ZNF660 (SEQ ID NO:6);
xlv) AOX (SEQ ID NO:1), C1orf114 (SEQ ID NO:2), HAPLN3 (SEQ ID NO:4) and ST6GALNAC3 (SEQ ID NO:5);
xlvi) AOX (SEQ ID NO:1), C1orf114 (SEQ ID NO:2), HAPLN3 (SEQ ID NO:4) and ZNF660 (SEQ ID NO:6);
xlvii) AOX (SEQ ID NO:1), C1orf114 (SEQ ID NO:2), ST6GALNAC3 (SEQ ID NO:5) and ZNF660 (SEQ ID NO:6);
xlviii) AOX (SEQ ID NO:1), GAS6 (SEQ ID NO:3), HAPLN3 (SEQ ID NO:4) and ST6GALNAC3 (SEQ ID NO:5);
xlix) AOX (SEQ ID NO:1), GAS6 (SEQ ID NO:3), HAPLN3 (SEQ ID NO:4) and ZNF660 (SEQ ID NO:6);
l) AOX (SEQ ID NO:1), GAS6 (SEQ ID NO:3), ST6GALNAC3 (SEQ ID NO:5) and ZNF660 (SEQ ID NO:6);
li) AOX (SEQ ID NO:1), HAPLN3 (SEQ ID NO:4), ST6GALNAC3 (SEQ ID NO:5) and ZNF660 (SEQ ID NO:6);
lii) C1orf114 (SEQ ID NO:2), GAS6 (SEQ ID NO:3), HAPLN3 (SEQ ID NO:4) and ST6GALNAC3 (SEQ ID NO:5);
liii) C1orf114 (SEQ ID NO:2), GAS6 (SEQ ID NO:3), HAPLN3 (SEQ ID NO:4) and ZNF660 (SEQ ID NO:6);
liv) C1orf114 (SEQ ID NO:2), GAS6 (SEQ ID NO:3), ST6GALNAC3 (SEQ ID NO:5) and ZNF660 (SEQ ID NO:6);
lv) C1orf114 (SEQ ID NO:2), HAPLN3 (SEQ ID NO:4), ST6GALNAC3 (SEQ ID NO:5) and ZNF660 (SEQ ID NO:6);
lvi) GAS6 (SEQ ID NO:3), HAPLN3 (SEQ ID NO:4), ST6GALNAC3 (SEQ ID NO:5) and ZNF660 (SEQ ID NO:6);
lvii) AOX (SEQ ID NO:1), C1orf114 (SEQ ID NO:2), GAS6 (SEQ ID NO:3), HAPLN3 (SEQ ID NO:4) and ST6GALNAC3 (SEQ ID NO:5);
lviii) AOX (SEQ ID NO:1), C1orf114 (SEQ ID NO:2), GAS6 (SEQ ID NO:3), HAPLN3 (SEQ ID NO:4) and ZNF660 (SEQ ID NO:6);
lix) AOX (SEQ ID NO:1), C1orf114 (SEQ ID NO:2), GAS6 (SEQ ID NO:3), ST6GALNAC3 (SEQ ID NO:5) and ZNF660 (SEQ ID NO:6);
lx) AOX (SEQ ID NO:1), C1orf114 (SEQ ID NO:2), HAPLN3 (SEQ ID NO:4), ST6GALNAC3 (SEQ ID NO:5) and ZNF660 (SEQ ID NO:6);
lxi) AOX (SEQ ID NO:1), GAS6 (SEQ ID NO:3), HAPLN3 (SEQ ID NO:4), ST6GALNAC3 (SEQ ID NO:5) and ZNF660 (SEQ ID NO:6);
lxii) C1orf114 (SEQ ID NO:2), GAS6 (SEQ ID NO:3), HAPLN3 (SEQ ID NO:4), ST6GALNAC3 (SEQ ID NO:5) and ZNF660 (SEQ ID NO:6);
lxiii) AOX (SEQ ID NO:1), C1orf114 (SEQ ID NO:2), GAS6 (SEQ ID NO:3), HAPLN3 (SEQ ID NO:4), ST6GALNAC3 (SEQ ID NO:5) and ZNF660 (SEQ ID NO:6);
wherein any one of said SEQ ID NO: 1, 2, 3, 4, 5 or 6 of said panels i) through lxiii) optionally is individually replaced by:
b′) a nucleotide sequence being complementary to any one of said SEQ ID NO:s 1, 2, 3, 4, 5 or 6 of said panels i) through lvii); or
b″) a nucleotide sequence having at least 90% sequence identity to any one of said SEQ ID NO:s 1, 2, 3, 4, 5 or 6 of said panels i) through lvii), or the complementary nucleotide sequences of b′); or
b″′) a fragment comprising at least 15 consecutive nucleotides of any one of said SEQ ID NO:s 1, 2, 3, 4, 5 or 6 of said panels i) through lvii), or the nucleotide sequences of b′), or the nucleotide sequences of b″);
c) obtaining a biomarker score based on the methylation level, transcriptional level, and/or translational expression level of the sampled nucleotide sequence of b), wherein the biomarker score is indicative of the prognosis of the prostate cancer patient.

8. The method according to claim any one of claims 6 and 7, wherein the biomarker score is selected from the group consisting of Gleason sum, prostate specific antigen (PSA) amount, MIC-I stromal staining and tumour-node-metastasis (TNM) stage.

9. A method of determining the risk of progression of a prostate cancer patient after therapy, comprising:
a) providing a sample obtained from said patient;
b) determining in the sample of a),
the methylation level, and/or
the transcriptional expression level, and/or
the translational expression level,
of one or more biomarkers, wherein the biomarkers are nucleotide sequences selected from the group consisting of:
I′) the nucleotide sequence of SEQ ID NO:2 (C1orf114); or
I″) a nucleotide sequence being complementary to SEQ ID NO: 2; or
I″′) a nucleotide sequence having at least 90% sequence identity to any one of I′ or I″; or
I″″) a fragment of any one of I′, I″ or I″′, wherein the fragment comprises at least 15 consecutive nucleotides of any one of I′, I″ or I″′; and
II′) the nucleotide sequence of SEQ ID NO:4 (HAPLN3); or
II″) a nucleotide sequence being complementary to SEQ ID NO: 4; or
II″′) a nucleotide sequence having at least 90% sequence identity to any one of II′ or II″; or
II″″) a fragment of any one of II′, II″ or II″′, wherein the fragment comprises at least 15 consecutive nucleotides of any one of I′, I″ or I″′; and
III′) the nucleotide sequence of SEQ ID NO:1 (AOX1); or
III″) a nucleotide sequence being complementary to SEQ ID NO: 1; or
III″′) a nucleotide sequence having at least 90% sequence identity to any one of III′ or III″′; or
III″″) a fragment of any one of III′, III″ or III″′, wherein the fragment comprises at least 15 consecutive nucleotides of any one of III′, III″ or III″′; and
IV′) the nucleotide sequence of SEQ ID NO:3 (GAS6); or
IV″) a nucleotide sequence being complementary to SEQ ID NO: 4; or
IV″′) a nucleotide sequence having at least 90% sequence identity to any one of IV′ or IV″; or
IV″″) a fragment of any one of IV′, IV″ or IV″′, wherein the fragment comprises at least 15 consecutive nucleotides of any one of IV′, IV″ or IV″′; and
V′) the nucleotide sequence of SEQ ID NO:5 (ST6GALNAC3); or
V″) a nucleotide sequence being complementary to SEQ ID NO: 5; or
V″′) a nucleotide sequence having at least 90% sequence identity to any one of V′ or V″; or
V″″) a fragment of any one of V′, V″ or V″′, wherein the fragment comprises at least 15 consecutive nucleotides of any one of V′, V″ or V″′; and
VI′) the nucleotide sequence of SEQ ID NO:6 (ZNF660); or
VI″) a nucleotide sequence being complementary to SEQ ID NO: 6; or
VI″′) a nucleotide sequence having at least 90% sequence identity to any one of VI′ or VI″; or
VI″″) a fragment of any one of VI′, VI″ or VI″′, wherein the fragment comprises at least 15 consecutive nucleotides of any one of VI′, VI″ or VI″′;
c) obtaining a biomarker score based on the methylation level, transcriptional level, and/or translational expression level of the sampled nucleotide sequence of b);
d) correlating the methylation level, transcriptional level, and/or translational expression level with the risk of progression.

10. A method for assisting prognosis of disease progression of prostate cancer in an individual having developed prostate cancer, the method comprising the steps of:
a) determining the methylation level of at least one gene selected from the group consisting of C1orf114 (SEQ ID NO:2), HAPLN3 (SEQ ID NO:4), AOX1 (SEQ ID NO:1), GAS6 (SEQ ID NO:3), ST6GALNAC3 (SEQ ID NO:5) and ZNF660 (SEQ ID NO:6) or determining the methylation level of at least one nucleotide sequence having at least 90% sequence identity with a nucleotide sequence selected from the group consisting of SEQ ID NO:2, SEQ ID NO:4, SEQ ID NO:1, SEQ ID NO:3, SEQ ID NO:5, and SEQ ID NO:6 or part thereof in a sample from said individual, and/or
b) determining the transcriptional expression level of at least one gene selected from the group consisting of C1orf114 (SEQ ID NO:2), HAPLN3 (SEQ ID NO:4), AOX1 (SEQ ID NO:1), GAS6 (SEQ ID NO:3), ST6GALNAC3 (SEQ ID NO:5) and ZNF660 (SEQ ID NO:6), or nucleotide sequence having at least 90% sequence identity with at least one nucleotide sequence selected from the group consisting of SEQ ID NO:2, SEQ ID NO:4, SEQ ID NO:1, SEQ ID NO:3, SEQ ID NO:5, and SEQ ID NO:6 or part thereof in said sample and/or
c) determining the translational expression level of at least one gene selected from the group consisting of C1orf114 (SEQ ID NO:2), HAPLN3 (SEQ ID NO:4), AOX1 (SEQ ID NO:1), GAS6 (SEQ ID NO:3), ST6GALNAC3 (SEQ ID NO:5) and ZNF660 (SEQ ID NO:6), or nucleotide sequence having at least 90% sequence identity with at least one nucleotide sequence selected from the group consisting of SEQ ID NO:2, SEQ ID NO:4, SEQ ID NO:1, SEQ ID NO:3, SEQ ID NO:5, and SEQ ID NO:6 or part thereof in said sample
wherein the methylation level of i) and/or the transcriptional level of ii) and/or the translational expression level of iii) is indicative of the outcome of prostate cancer

11. A method for assisting in predicting and/or for predicting the outcome of prostate cancer in an individual having developed prostate cancer comprising the steps of:
a) determining the methylation level of at least one gene selected from the group consisting of C1orf114 (SEQ ID NO:2), HAPLN3 (SEQ ID NO:4), AOX1 (SEQ ID NO:1), GAS6 (SEQ ID NO:3), ST6GALNAC3 (SEQ ID NO:5) and ZNF660 (SEQ ID NO:6) or determining the methylation level of at least one nucleotide sequence having at least 90% sequence identity with a nucleotide sequence selected from the group consisting of SEQ ID NO:2, SEQ ID NO:4, SEQ ID NO:1, SEQ ID NO:3, SEQ ID NO:5, and SEQ ID NO:6 or part thereof in a sample from said individual, and/or
b) determining the transcriptional expression level of at least one gene selected from the group consisting of C1orf114 (SEQ ID NO:2), HAPLN3 (SEQ ID NO:4), AOX1 (SEQ ID NO:1), GAS6 (SEQ ID NO:3), ST6GALNAC3 (SEQ ID NO:5) and ZNF660 (SEQ ID NO:6), or nucleotide sequence having at least 90% sequence identity with at least one nucleotide sequence selected from the group consisting of SEQ ID NO:2, SEQ ID NO:4, SEQ ID NO:1, SEQ ID NO:3, SEQ ID NO:5, and SEQ ID NO:6 or part thereof in said sample and/or
c) determining the translational expression level of at least one gene selected from the group consisting of C1orf114 (SEQ ID NO:2), HAPLN3 (SEQ ID NO:4), AOX1 (SEQ ID NO:1), GAS6 (SEQ ID NO:3), ST6GALNAC3 (SEQ ID NO:5) and ZNF660 (SEQ ID NO:6), or nucleotide sequence having at least 90% sequence identity with at least one nucleotide sequence selected from the group consisting of SEQ ID NO:2, SEQ ID NO:4, SEQ ID NO:1, SEQ ID NO:3, SEQ ID NO:5, and SEQ ID NO:6 or part thereof in said sample
wherein the methylation level of a) and/or the transcriptional level of b) and/or the translational expression level of c) is indicative of the outcome of prostate cancer.

12. A method for assisting in monitoring and/or for monitoring the effect of treatment on prostate cancer progression in an individual having developed prostate cancer and being treated for said prostate cancer, comprising the steps of:
a) determining the methylation level of at least one gene selected from the group consisting of C1orf114 (SEQ ID NO:2), HAPLN3 (SEQ ID NO:4), AOX1 (SEQ ID NO:1), GAS6 (SEQ ID NO:3), ST6GALNAC3 (SEQ ID NO:5) and ZNF660 (SEQ ID NO:6) or determining the methylation level of at least one nucleotide sequence having at least 90% sequence identity with a nucleotide sequence selected from the group consisting of SEQ ID NO:2, SEQ ID NO:4, SEQ ID NO:1, SEQ ID NO:3, SEQ ID NO:5, and SEQ ID NO:6 or part thereof in a sample from said individual, and/or
b) determining the transcriptional expression level of at least one gene selected from the group consisting of C1orf114 (SEQ ID NO:2), HAPLN3 (SEQ ID NO:4), AOX1 (SEQ ID NO:1), GAS6 (SEQ ID NO:3), ST6GALNAC3 (SEQ ID NO:5) and ZNF660 (SEQ ID NO:6), or nucleotide sequence having at least 90% sequence identity with at least one nucleotide sequence selected from the group consisting of SEQ ID NO:2, SEQ ID NO:4, SEQ ID NO:1, SEQ ID NO:3, SEQ ID NO:5, and SEQ ID NO:6 or part thereof in said sample and/or
c) determining the translational expression level of at least one gene selected from the group consisting of C1orf114 (SEQ ID NO:2), HAPLN3 (SEQ ID NO:4), AOX1 (SEQ ID NO:1), GAS6 (SEQ ID NO:3), ST6GALNAC3 (SEQ ID NO:5) and ZNF660 (SEQ ID NO:6), or nucleotide sequence having at least 90% sequence identity with at least one nucleotide sequence selected from the group consisting of SEQ ID NO:2, SEQ ID NO:4, SEQ ID NO:1, SEQ ID NO:3, SEQ ID NO:5, and SEQ ID NO:6 or part thereof in said sample
wherein the methylation level of i) and/or the transcriptional level of ii) and/or the translational expression level of iii) is indicative of prostate cancer progression.

13. The method according to any one of claims 8 to 12, wherein an increased methylation level is indicative of poor outcome.

14. The method according to any one of claims 8 to 12, wherein a decreased transcriptional and/or translational expression level in the sample is indicative of a poor outcome.

15. The method according to any one of claims 8 to 12, wherein an increased level is indicative of high recurrence risk of prostate cancer.

16. The method according to any one of claims 8 to 12, wherein a decreased transcriptional and/or translational expression level is indicative of high recurrence risk of prostate cancer.

17. The method according to claim 16, wherein the recurrence risk is determined following radical prostatectomy.

18. The method according to any one of the preceding claims, wherein an increased methylation level in a sample from an individual, when compared to the methylation level in a sample taken from the same individual
a) before treatment onset and/or
b) at an earlier time point during treatment
is indicative of a progression of said prostate cancer.

19. The method according to any one of the preceding claims, wherein a decreased transcriptional and/or translational expression level in a sample from an individual, when compared to the transcriptional and/or translational expression level in a sample taken from the same individual
a) before treatment onset and/or
b) at an earlier time point during treatment
is indicative of a progression of said prostate cancer.

20. A method for assisting in monitoring and/or for monitoring the progression of prostate cancer from a silent/indolent to an aggressive prostate cancer in an individual having developed prostate cancer comprising the steps of:
a) determining the methylation level of at least one gene selected from the group consisting of C1orf114 (SEQ ID NO:2), HAPLN3 (SEQ ID NO:4), AOX1 (SEQ ID NO:1), GAS6 (SEQ ID NO:3), ST6GALNAC3 (SEQ ID NO:5) and ZNF660 (SEQ ID NO:6) or determining the methylation level of at least one nucleotide sequence having at least 90% sequence identity with a nucleotide sequence selected from the group consisting of SEQ ID NO:2, SEQ ID NO:4, SEQ ID NO:1, SEQ ID NO:3, SEQ ID NO:5, and SEQ ID NO:6 or part thereof in a sample from said individual, and/or
b) determining the transcriptional expression level of at least one gene selected from the group consisting of C1orf114 (SEQ ID NO:2), HAPLN3 (SEQ ID NO:4), AOX1 (SEQ ID NO:1), GAS6 (SEQ ID NO:3), ST6GALNAC3 (SEQ ID NO:5) and ZNF660 (SEQ ID NO:6), or nucleotide sequence having at least 90% sequence identity with at least one nucleotide sequence selected from the group consisting of SEQ ID NO:2, SEQ ID NO:4, SEQ ID NO:1, SEQ ID NO:3, SEQ ID NO:5, and SEQ ID NO:6 or part thereof in said sample and/or
c) determining the translational expression level of at least one gene selected from the group consisting of C1orf114 (SEQ ID NO:2), HAPLN3 (SEQ ID NO:4), AOX1 (SEQ ID NO:1), GAS6 (SEQ ID NO:3), ST6GALNAC3 (SEQ ID NO:5) and ZNF660 (SEQ ID NO:6), or nucleotide sequence having at least 90% sequence identity with at least one nucleotide sequence selected from the group consisting of SEQ ID NO:2, SEQ ID NO:4, SEQ ID NO:1, SEQ ID NO:3, SEQ ID NO:5, and SEQ ID NO:6 or part thereof in said sample
wherein increased methylation level of a) and/or decreased transcriptional level of b) and/or decreased translational expression level of c) is indicative of the progression of prostate cancer from a silent/indolent to an aggressive prostate cancer.

21. The method according to claim 20, wherein a silent/indolent prostate cancer is a slow-growing and slow-progressing organ-confined prostate cancer with no or only minor clinical symptoms.

22. The method according to any one of claims 20 to 21, wherein an aggressive prostate cancer is one which has progressed or will progress relatively fast (i.e. within the remaining life expectancy of a given patient) to non-organ-confined prostate cancer.

23. The method according to claim 22, wherein an aggressive prostate cancer is a treatment-requiring prostate cancer.

24. The method according to any one of the preceding claims, wherein an increased methylation level, when compared to the methylation level measured at an earlier time point of the course of disease of said prostate cancer, is indicative of a progression of said prostate cancer.

25. The method according to any one of the preceding claims, wherein a decreased transcriptional and/or translational expression level, when compared to transcriptional and/or translational expression level measured at an earlier time point of the course of disease of said prostate cancer, is indicative a progression of said prostate cancer.

26. A method for assisting in determining and/or determining the treatment regime of an individual having developed prostate cancer comprising the steps of:
a) determining the methylation level of at least one gene selected from the group consisting of C1orf114 (SEQ ID NO:2), HAPLN3 (SEQ ID NO:4), AOX1 (SEQ ID NO:1), GAS6 (SEQ ID NO:3), ST6GALNAC3 (SEQ ID NO:5) and ZNF660 (SEQ ID NO:6) or determining the methylation level of at least one nucleotide sequence having at least 90% sequence identity with a nucleotide sequence selected from the group consisting of SEQ ID NO:2, SEQ ID NO:4, SEQ ID NO:1, SEQ ID NO:3, SEQ ID NO:5, and SEQ ID NO:6 or part thereof in a sample from said individual, and/or
b) determining the transcriptional expression level of at least one gene selected from the group consisting of C1orf114 (SEQ ID NO:2), HAPLN3 (SEQ ID NO:4), AOX1 (SEQ ID NO:1), GAS6 (SEQ ID NO:3), ST6GALNAC3 (SEQ ID NO:5) and ZNF660 (SEQ ID NO:6), or nucleotide sequence having at least 90% sequence identity with at least one nucleotide sequence selected from the group consisting of SEQ ID NO:2, SEQ ID NO:4, SEQ ID NO:1, SEQ ID NO:3, SEQ ID NO:5, and SEQ ID NO:6 or part thereof in said sample and/or
c) determining the translational expression level of at least one gene selected from the group consisting of C1orf114 (SEQ ID NO:2), HAPLN3 (SEQ ID NO:4), AOX1 (SEQ ID NO:1), GAS6 (SEQ ID NO:3), ST6GALNAC3 (SEQ ID NO:5) and ZNF660 (SEQ ID NO:6), or nucleotide sequence having at least 90% sequence identity with at least one nucleotide sequence selected from the group consisting of SEQ ID NO:2, SEQ ID NO:4, SEQ ID NO:1, SEQ ID NO:3, SEQ ID NO:5, and SEQ ID NO:6 or part thereof in said sample
wherein the methylation level of a) and/or the transcriptional level of b) and/or the translational expression level of c) is indicative of the treatment regime to be offered to the individual having developed prostate cancer.

27. The method of any one of the preceding claims, wherein the method comprises the steps of:
a) determining the methylation level of at least one gene selected from the group consisting of AOX1 (SEQ ID NO:1), C1orf114 (SEQ ID NO:2), GAS6 (SEQ ID NO:3), HAPLN3 (SEQ ID NO:4), ST6GALNAC3 (SEQ ID NO:5) and ZNF660 (SEQ ID NO:6) or nucleotide sequence having at least 90% sequence identity with a nucleotide sequence selected from the group consisting of SEQ ID NO:7, SEQ ID NO:8, SEQ ID NO:9, SEQ ID NO:10, SEQ ID NO:11 and SEQ ID NO:12, or part thereof in a control sample
b) determining the methylation level of at least one gene selected from the group consisting of AOX1 (SEQ ID NO:1), C1orf114 (SEQ ID NO:2), GAS6 (SEQ ID NO:3), HAPLN3 (SEQ ID NO:4), ST6GALNAC3 (SEQ ID NO:5) and ZNF660 (SEQ ID NO:6) as identified in a) in a sample from said individual
c) comparing the methylation level determined in a) and b), wherein if the methylation level determined in b) is higher than the methylation level determined in a) then the methylation level is increased and wherein if the methylation level determined in b) is lower than the methylation level determined in a) then the methylation level is decreased.

28. The method according to any one of the preceding claims, wherein the methylation level of the sampled nucleotide is at least 0.0001%, such as at least 0.001%, such as at least 0.01%, such as at least 0.1%, such as at least 0.5%, such as at least 1%, such as at least 2%, such as at least 3%, such as at least 4%, such as at least 5%, such as at least 6%, such as at least 7%, such as at least 8%, such as at least 9%, such as at least 10%, such as at least 15%, such as at least 20%, such as at least 30%, such as at least 40%, such as at least 50%, such as at least 60%, such as at least 70%, such as at least 80%, such as at least 90%, such as at least 95% above the methylation level of the corresponding nucleotide sequence of the control sample.

29. The method according to any one of the preceding claims, wherein the methylation level is determined over the entire AOX1 gene according to SEQ ID NO:1.

30. The method according to any one of the preceding claims, wherein the methylation level is determined over the entire C1orf114 gene according to SEQ ID NO:2.

31. The method according to any one of the preceding claims, wherein the methylation level is determined over the entire GAS6 gene according to SEQ ID NO:3.

32. The method according to any one of the preceding claims, wherein the methylation level is determined over the entire HAPLN3 gene according to SEQ ID NO:4.

33. The method according to any one of the preceding claims, wherein the methylation level is determined over the entire ST6GALNAC3 (SEQ ID NO:5) gene according to SEQ ID NO:5.

34. The method according to any one of the preceding claims, wherein the methylation level is determined over the entire ZNF660 gene according to SEQ ID NO:6.

35. The method according to any one of the preceding claims, wherein the methylation level is determined over a stretch of 100 to 500 consecutive basepairs of the AOX1 gene according to SEQ ID NO:1.

36. The method according to any one of the preceding claims, wherein the methylation level is determined over a stretch of 100 to 500 consecutive basepairs of the C1orf114 gene according to SEQ ID NO:2.

37. The method according to any one of the preceding claims, wherein the methylation level is determined over a stretch of 100 to 500 consecutive basepairs of the GAS6 gene according to SEQ ID NO:3.

38. The method according to any one of the preceding claims, wherein the methylation level is determined over a stretch of 100 to 500 consecutive basepairs of the HAPLN3 gene according to SEQ ID NO:4.

39. The method according to any one of the preceding claims, wherein the methylation level is determined over a stretch of 100 to 500 consecutive basepairs of the ST6GALNAC3 (SEQ ID NO:5) gene according to SEQ ID NO:5.

40. The method according to any one of the preceding claims, wherein the methylation level is determined over a stretch of 100 to 500 consecutive basepairs of the ZNF660 gene according to SEQ ID NO:6.

41. The method according to any one of the preceding claims, wherein the methylation incidence is determined in at least a part of a region of the AOX1 gene comprising basepair no. 4907 to basepair no. 5374 of SEQ ID NO:1, or a sequence which is at least 90% identical to basepair no. 4907 to basepair no. 5374 of SEQ ID NO:1.

42. The method according to any one of the preceding claims, wherein the methylation incidence is determined in at least a part of a region of the C1orf114 gene comprising basepair no. 4777 to basepair no. 5072 of SEQ ID NO:2, or a sequence which is at least 90% identical to basepair no. 4777 to basepair no. 5072 of SEQ ID NO:2.

43. The method according to any one of the preceding claims, wherein the methylation incidence is determined in at least a part of a region of the GAS6 gene comprising basepair no. 5948 to basepair no. 6265 of SEQ ID NO:3, or a sequence which is at least 90% identical to basepair no. 5948 to basepair no. 6265 of SEQ ID NO:3.

44. The method according to any one of the preceding claims, wherein the methylation incidence is determined in the HAPLN3 gene comprising basepair no. 4896 to 5402 of SEQ ID NO:4

45. The method according to any one of the preceding claims, wherein the methylation incidence is determined in at least a part of a region of the ST6GALNAC3 (SEQ ID NO:5) gene comprising basepair no. 5097 to basepair no. 5186 of SEQ ID NO:5, or a sequence which is at least 90% identical to basepair no. 5097 to basepair no. 5186 of SEQ ID NO:5.

46. The method according to any one of the preceding claims, wherein the methylation incidence is determined in at least a part of a region of the ZNF660 gene comprising basepair no. 4923 to basepair no. 5225 of SEQ ID NO:6, or a sequence which is at least 90% identical to basepair no. 4923 to basepair no. 5225 of SEQ ID NO:6.

47. The methods according to any one of the preceding claims, wherein the methods optionally comprises a step of comparing the transcriptional and/or translational expression level in the sample to the expression level of a control sample, wherein the expression level in the sample is increased, when it is higher than the expression level in said control sample or decreased when it is lower than the expression level in said control sample.

48. The method according any one of the preceding claims, wherein said control sample is an unmethylated nucleotide sequence having at least 90% sequence identity with SEQ ID NO: 1, SEQ ID NO: 2, SEQ ID NO: 3, SEQ ID NO: 4, SEQ ID NO: 5 and/or SEQ ID NO: 6 or part thereof.

49. The methods according to any of the preceding claims, wherein the transcriptional expression level is determined by RT-PCR.

50. The method according to any of the preceding claims, wherein the translational expression level is determined by immunohistochemical analysis.

51. The method according to any of the preceding claims, wherein the sample is a tissue sample.

52. The method according to any of the preceding claims, wherein the sample is a biopsy of the prostate gland or resected prostate tissue.

53. The method according to any of the preceding claims, wherein the sample is a body fluid sample such as a blood, serum, semen, plasma or urine sample.

54. The methods according to any of the preceding claims, wherein said individual has a normal prostate specific antigen (PSA) level.

55. The method according to any of the proceeding claims wherein said individual has a PSA level higher than a normal PSA level.

56. The method according to any one of claims 49 and 50, wherein a normal PSA level is a PSA level of at the most 3 ng per mL serum.

57. The method according to any of the preceding claims, further comprising a step of determining the methylation level and/or translational level and/or transcriptional level of at least one of the genes selected from the group consisting of GABRE, TFF3, ZNF132, PCA3, GSTP1, PITX2 and SLC18A2.

58. A method of treating a prostate cancer patient comprising determining at least one clinical parameter for said patient, determining the status of at least one gene selected from the group consisting of C1orf114 (SEQ ID NO:2), HAPLN3 (SEQ ID NO:4), AOX1 (SEQ ID NO:1), GAS6 (SEQ ID NO:3), ST6GALNAC3 (SEQ ID NO:5) and ZNF660 (SEQ ID NO:6), in a sample obtained from the patient, and (a) recommending, prescribing or initiating active treatment if said patient has at least one risk-associated clinical parameter and an elevated status for said gene, or (b) recommending, prescribing or initiating watchful waiting if said patient has neither a risk-associated clinical parameter nor an elevated status for said gene or genes.

59. Use of a plurality of oligonucleotides for determining the expression level of a panel of genes, where said panel comprises two or more biomarkers selected from:
I′) the nucleotide sequence of SEQ ID NO:1 (AOX1); or
I″) a nucleotide sequence being complementary to SEQ ID NO: 1; or
I″′) a nucleotide sequence having at least 90% sequence identity to any one of I′ or I″; or
I″″) a fragment of any one of I′, I″ or I″′, wherein the fragment comprises at least 15 consecutive nucleotides of any one of I′, I″ or I″′; and
II′) the nucleotide sequence of SEQ ID NO:2 (C1orf114); or
II″) a nucleotide sequence being complementary to SEQ ID NO: 2; or
II″′) a nucleotide sequence having at least 90% sequence identity to any one of II′ or II″; or
II″″) a fragment of any one of II′, II″ or II″′, wherein the fragment comprises at least 15 consecutive nucleotides of any one of I′, I″ or I″′; and
III′) the nucleotide sequence of SEQ ID NO:3 (GAS6); or
III″) a nucleotide sequence being complementary to SEQ ID NO: 3; or
III″′) a nucleotide sequence having at least 90% sequence identity to any one of III′ or III″′; or
III″″) a fragment of any one of III′, III″ or III″′, wherein the fragment comprises at least 15 consecutive nucleotides of any one of III′, III″ or III″′; and
IV′) the nucleotide sequence of SEQ ID NO:4 (HAPLN3); or
IV″) a nucleotide sequence being complementary to SEQ ID NO: 4; or
IV″′) a nucleotide sequence having at least 90% sequence identity to any one of IV′ or IV″; or
IV″″) a fragment of any one of IV′, IV″ or IV″′, wherein the fragment comprises at least 15 consecutive nucleotides of any one of IV′, IV″ or IV″′; and
V′) the nucleotide sequence of SEQ ID NO:5 (ST6GALNAC3 (SEQ ID NO:5)); or
V″) a nucleotide sequence being complementary to SEQ ID NO: 5; or
V″′) a nucleotide sequence having at least 90% sequence identity to any one of V′ or V″; or
V″″) a fragment of any one of V′, V″ or V″′, wherein the fragment comprises at least 15 consecutive nucleotides of any one of V′, V″ or V″′; and
VI′) the nucleotide sequence of SEQ ID NO:6 (ZNF660); or
VI″) a nucleotide sequence being complementary to SEQ ID NO: 6; or
VI″′) a nucleotide sequence having at least 90% sequence identity to any one of VI′ or VI″; or
VI″″) a fragment of any one of VI′, VI″ or VI″′, wherein the fragment comprises at least 15 consecutive nucleotides of any one of VI′, VI″ or VI″′;
for the manufacture of a diagnostic product useful to determine the prognosis or likelihood of recurrence of prostate cancer in an individual.

60. A system for predicting the prognosis of an individual with prostate cancer, comprising:
a) means for analysing the methylation level, transcriptional level, and/or translational expression levels of one or more biomarkers in a sample obtained from said individual, and
b) means for estimating the probability for a patient with prostate cancer of surviving for a certain period of time,
wherein said biomarker comprises one or more nucleotide sequences selected from the group consisting of:
I′) the nucleotide sequence of SEQ ID NO:1 (AOX1); or
I″) a nucleotide sequence being complementary to SEQ ID NO: 1; or
I″′) a nucleotide sequence having at least 90% sequence identity to any one of I′ or I″; or
I″″) a fragment of any one of I′, I″ or I″′, wherein the fragment comprises at least 15 consecutive nucleotides of any one of I′, I″ or I″′; and
II′) the nucleotide sequence of SEQ ID NO:2 (C1orf114); or
II″) a nucleotide sequence being complementary to SEQ ID NO: 2; or
II″′) a nucleotide sequence having at least 90% sequence identity to any one of II′ or II″; or
II″″) a fragment of any one of II′, II″ or II″′, wherein the fragment comprises at least 15 consecutive nucleotides of any one of I′, I″ or I″′; and
III′) the nucleotide sequence of SEQ ID NO:3 (GAS6); or
III″) a nucleotide sequence being complementary to SEQ ID NO: 3; or
III″′) a nucleotide sequence having at least 90% sequence identity to any one of III′ or III″′; or
III″″) a fragment of any one of III′, III″ or III″′, wherein the fragment comprises at least 15 consecutive nucleotides of any one of III′, III″ or III″′; and
IV′) the nucleotide sequence of SEQ ID NO:4 (HAPLN3); or
IV″) a nucleotide sequence being complementary to SEQ ID NO: 4; or
IV″′) a nucleotide sequence having at least 90% sequence identity to any one of IV′ or IV″; or
IV″″) a fragment of any one of IV′, IV″ or IV″′, wherein the fragment comprises at least 15 consecutive nucleotides of any one of IV′, IV″ or IV″′; and
V′) the nucleotide sequence of SEQ ID NO:5 (ST6GALNAC3 (SEQ ID NO:5)); or
V″) a nucleotide sequence being complementary to SEQ ID NO: 5; or
V″′) a nucleotide sequence having at least 90% sequence identity to any one of V′ or V″; or
V″″) a fragment of any one of V′, V″ or V″′, wherein the fragment comprises at least 15 consecutive nucleotides of any one of V′, V″ or V″′; and
VI′) the nucleotide sequence of SEQ ID NO:6 (ZNF660); or
VI″) a nucleotide sequence being complementary to SEQ ID NO: 6; or
VI″′) a nucleotide sequence having at least 90% sequence identity to any one of VI′ or VI″; or
VI″″) a fragment of any one of VI′, VI″ or VI″′, wherein the fragment comprises at least 15 consecutive nucleotides of any one of VI′, VI″ or VI″′.

61. A computer program product having a computer readable medium, said computer program product providing a system for predicting the prognosis of an individual, said computer program product comprising means for carrying out any of the steps of any of the method according to claim 60.

62. A method for predicting a probability of recurrence of prostate cancer in a patient following radical prostatectomy, comprising:
correlating a set of pre-operative factors for the patient to a functional representation of a set of pre-operative factors determined for each of a plurality of persons previously diagnosed with prostatic cancer and having been treated by radical prostatectomy, so as to yield a value for total points for the patient, which set of factors for each of a plurality of persons is correlated with the incidence of recurrence of prostatic cancer for each person in the plurality of persons, wherein the set of pre-operative factors comprises pre-treatment methylation level, transcriptional level, and/or translational expression levels of one or more genes selected from the group consisting of: C1orf114 (SEQ ID NO:2), HAPLN3 (SEQ ID NO:4), AOX1 (SEQ ID NO:1), GAS6 (SEQ ID NO:3), ST6GALNAC3 (SEQ ID NO:5) and ZNF660 (SEQ ID NO:6), and optionally one or more of pre-treatment PSA level, primary Gleason grade or secondary Gleason grade, wherein the functional representation comprises a scale for each of pre-treatment methylation level, transcriptional level, and/or translational expression levels of one or more genes selected from the group consisting of C1orf114 (SEQ ID NO:2), HAPLN3 (SEQ ID NO:4), AOX1 (SEQ ID NO:1), GAS6 (SEQ ID NO:3), ST6GALNAC3 (SEQ ID NO:5) and ZNF660 (SEQ ID NO:6), and optionally a scale for one or more of pre-treatment PSA level, primary Gleason grade or secondary Gleason grade, a points scale, a total points scale, and a predictor scale, wherein the scales for pre-treatment methylation level, transcriptional level, and/or translational expression levels of one or more genes selected from the group consisting of C1orf114 (SEQ ID NO:2), HAPLN3 (SEQ ID NO:4), AOX1 (SEQ ID NO:1), GAS6 (SEQ ID NO:3), ST6GALNAC3 (SEQ ID NO:5) and ZNF660 (SEQ ID NO:6), and optionally one or more of pre-treatment PSA level, primary Gleason grade or secondary Gleason grade, each have values on the scales which can be correlated with values on the points scale, and wherein the total points scale has values which may be correlated with values on the predictor scale; and b) correlating the value on the total points scale for the patient with a value on the predictor scale to predict the quantitative probability of recurrence of prostatic cancer in the patient following radical prostatectomy.

63. An apparatus for predicting a probability of disease recurrence in a patient with prostate cancer following a radical prostatectomy, which apparatus comprises: a) a correlation of a set of pre-operative factors for each of a plurality of persons previously diagnosed with prostatic cancer and having been treated by radical prostatectomy with the incidence of recurrence of prostatic cancer for each person of the plurality of persons, wherein the set of pre-operative factors comprises pre-treatment methylation level, transcriptional level, and/or translational expression levels of one or more genes selected from the group consisting of C1orf114 (SEQ ID NO:2), HAPLN3 (SEQ ID NO:4), AOX1 (SEQ ID NO:1), GAS6 (SEQ ID NO:3), ST6GALNAC3 (SEQ ID NO:5) and ZNF660 (SEQ ID NO:6), and optionally one or more of pre-treatment PSA level, primary Gleason grade or secondary Gleason grade; and b) a means for comparing an identical set of pre-operative factors determined from a patient diagnosed as having prostate cancer to the correlation to predict the quantitative probability of recurrence of prostate cancer in the patient following radical prostatectomy.

64. The method, the use, the system or the apparatus according to any one of the preceding claims, wherein the methylation level is selected from methylation degree and/or methylation incidence.
